(19) United States
(12) Patent Application Publication
(10) Pub. No.: US 2004/0087770 A1
(43) Pub. Date: May 6, 2004

(54) Virulence genes, proteins, and their use

(76) Inventor: Christoph Tang, London (GB)

Correspondence Address: SALIWANCHIK LLOYD & SALIWANCHIK, A PROFESSIONAL ASSOCIATION, 2421 N.W. 41ST STREET, SUITE A-1, GAINESVILLE, FL, 326066669

(21) Appl. No.: 10/275,026

(22) PCT Filed: May 8, 2001
(86) PCT No.: PCT/GB01/02003

(30) Foreign Application Priority Data
May 8, 2000 (GB) 0011108.3

(51) Int. Cl. C07K 1/00; C07K 14/00; C07K 17/00

(52) U.S. Cl. 530/350

(57) ABSTRACT

A series of genes from Neisseria meningitidis are shown to encode products which are implicated in virulence. The identification of these genes therefore allows attenuated microorganisms to be produced. Furthermore, the genes or their encoded products can be used in the manufacture of vaccines for therapeutic application.

### FIELD OF THE INVENTION

[0001] This invention relates to virulence genes and proteins, and their use. More particularly, it relates to genes and proteins/peptides obtained from Neisseria meningitidis, and their use in therapy and in screening for drugs.

### BACKGROUND OF THE INVENTION

[0002] Neisseria meningitidis is a Gram-negative bacterial pathogen that is implicated in septic shock and bacterial meningitis. This bacterium is a leading cause of bacterial meningitis in developed countries, and causes large-scale epidemics in Africa and China. In the UK, Neisseria meningitidis is the leading cause of death in childhood apart from road traffic accidents. The bacterium naturally inhabits the human naso-pharynx and then gains access to the blood stream from where it causes severe septicaemia or meningitis. Although current anti-microbials are effective in eliminating the bacterium from the body, the mortalilty from menigococcal septcaemia remains substantial. It would be desirable to provide means for treating or preventing conditions caused by Neisseria meningitidis, e.g. by immunisation.

### SUMMARY OF THE INVENTION

[0003] The present invention is based on the discovery of virulence genes in Neisseria meningitidis.

[0004] According to a first aspect of the invention, a peptide of the invention is encoded by an operon including any of the nucleotide sequences identified in claim 1, or a homologue thereof in a Gram-negative bacterium, or a functional fragment thereof, for therapeutic or diagnostic use.

[0005] The peptides may have many therapeutic uses for treating Neisseria infections, including use in vaccines for prophylactic application.

[0006] According to a second aspect, a polynucleotide encoding a peptide defined above, may also be useful for therapy or diagnosis.

[0007] According to a third aspect, the genes that encode the peptides may be utilised to prepare attenuated microorganisms. The attenuated microorganisms will usually have a mutation that disrupts the expression of one or more of the genes identified herein, to provide a strain that lacks virulence. These microorganisms will also have use in therapy and diagnosis.

[0008] According to a fourth aspect, the peptides, genes and attenuated microorganisms according to the invention may be used in the treatment or prevention of a condition associated with infection by Neisseria or Gram-negative bacteria.

### DESCRIPTION OF THE INVENTION

[0009] The present invention is based on the discovery of genes encoding peptides which are implicated in virulence. The peptides and genes of the invention are therefore useful for the preparation of therapeutic agents to treat infection. It should be understood that references to therapy also include preventative treatments, e.g. vaccination. Furthermore, while the products of the invention are intended primarily for treatment of infections in human patients, veterinary applications are also considered to be within the scope of the invention.

[0010] The present invention is described with reference to Neisseria meningitidis. However, all the Neisseria strains, and many other Gram-negative bacterial strains are likely to include related peptides or proteins having amino acid sequence identity or similarity to those identified herein. Organisms likely to contain the peptides include, but are not limited to the genera Salmonella, Enterobacter, Klebsiella, Shigella and Yersinia.

[0011] The experiments carried out to identify the virulence genes of the invention utilised N. meningitidis strain B. Homology searches were performed on the strain A database, however the proteins and genes from strain B are preferred.

[0012] Preferably, the peptides that may be useful in the various aspects of the invention have greater than a 40% similarity with the peptides identified herein. More preferably, the peptides have greater than 60% sequence similarity. Most preferably, the peptides have greater than 80% sequence similarity, e.g. 95% similarity. With regard to the polynucleotide sequences identified herein, related polynucleotides that may be useful in the various aspects of the invention may have greater than 40% identity with the sequences identified herein. More preferably, the polynucleotide sequences have greater than 60% sequence identity. Most preferably, the polynucleotide sequences have greater than 80% sequence identity, e.g. 95% identity.

[0013] The terms “similarity” and “identity” are known in the art. The use of the term “identity” refers to a sequence comparison based on identical matches between correspondingly identical positions in the sequences being compared. The term “similarity” refers to a comparison between amino acid sequences, and takes into account not only identical amino acids in corresponding positions, but also functionally similar amino acids in corresponding positions. Thus similarity between polypeptide sequences indicates functional similarity, in addition to sequence similarity.

[0014] Levels of identity between gene sequences and levels of identity or similarity between amino acid sequences can be calculated using known methods. In relation to the present invention, publicly available computer based methods for determining identity and similarity include the BLASTP, BLASTN and FASTA (Atschul et al., J. Molec. Biol., 1990; 215:403-410), the BLASTX program available from NCBI, and the Gap program from Genetics Computer Group, Madison Wiss. The levels of similarity and identity provided herein, were obtained using the Gap program, with a Gap penalty of 12 and a Gap length penalty of 4 for determining the amino acid sequence comparisons, and a Gap penalty of 50 and a Gap length penalty of 3 for the polynucleotide sequence comparisons.

[0015] Having characterised a gene according to the invention, it is possible to use the gene sequence to search for related genes or peptides in other microorganisms. This may be carried out by searching in existing databases, e.g. EMBL or GenBank.

[0016] Peptides or proteins according to the invention may be purified and isolated by methods known in the art. In particular, having identified the gene sequence, it will be possible to use recombinant techniques to express the genes in a suitable host. Active fragments and related molecules can be identified and may be useful in therapy. For example, the peptides or their active fragments may be used as antigenic determinants in a vaccine, to elicit an immune response. They may also be used in the preparation of antibodies, for passive immunisation, or diagnostic applications. Suitable antibodies include monodonal antibodies, or fragments thereof, including single chain Fv fragments. Methods for the preparation of antibodies will be apparent to those skilled in the art.

[0017] Active fragments of the peptides are those that retain the biological function of the peptide. For example, when used to elicit an immune response, the fragment will be of sufficient size, such that antibodies generated from the fragment will discriminat between that peptide and other peptides on the bacterial microorganism. Typically, the fragment will be at least 30 nucleotides (10 amino acids) in size, preferably 60 nucleotides (20 amino acids) and most preferably greater than 90 nucleotides (30 amino acids) in size.

[0018] It should also be understood, that in addition to related molecules from other microorganisms, the invention encompasses modifications made to the peptides and polynucleotides identfied herein which do not significantly alter the biological function. It will be apparent to the skilled person that the degeneracy of the genetic cod can result in polynucleotides with minor base changes from those specified herein, but which nevertheless encod the same peptides. Complementary polynucleotides are also within the invention. Conservative replacements at the amino acid level are also envisaged, i.e. different acidic or basic amino acids may be substituted without substantial loss of function.

[0019] The preparation of vaccines based on attenuated microorganisms is known to those skilled in the art. Vaccine compositions can be formulated with suitable carriers or adjuvants, e.g. alum, as necessary or desired, to provide effective immunisation against infection. The preparation of vaccine formulations will be apparent to the skilled person. The attenuated microorganisms may be prepared with a mutation that disrupts the expression of any of the genes identified herein. The skilled person will be aware of methods for disrupting expression of particular genes. Techniques that may be used include insertional inactivation or gene deletion techniques. Attenuated microorganisms according to the invention may also comprise additional mutations in other genes, for example in a second gene identified herein or in a separate gene required for growth of the microorganism, e.g. an aro mutation or, with regard to Salmonella, in a gene located in the SPI2 region identified in WO-A-96/17951.

[0020] Attenuated microorganisms may also be used as carrier systems for the delivery of heterologous antigens, therapeutic proteins or nucleic acids (DNA or RNA). In this embodiment, the attenuated microorganisms are used to deliver a heterologous antigen, protein or nucleic acid to a particular site in vivo. Introduction of a heterologous antigen, peptide or nucleic acid into an attenuated microorganism can be carried out by conventional techniques, including the use of recombinant constructs, e.g. vectors, which comprise polynucleotides that express the heterologous antigen or therapeutic protein, and also include suitable promoter sequences. Alternatively, the gene that encodes the heterologous antigen or protein may be incorporated into the genome of the organism and the endogenous promoters used to control expression.

[0021] More generally, and as is well known to those skilled in the art, a suitable amount of an active component of the invention can be selected, for therapeutic use, as can suitable carriers or excipients, and routes of administration. These factors would be chosen or determined according to known criteria such as the nature/severity of the condition to be treated, the type and/or health of the subject etc.

[0022] In a separate embodiment, the products of the invention may be used in screening assays for the identification of potential antimicrobial drugs or for the detection for virulence. Routine screening assays are known to those skilled in the art, and can be adapted using the products of the invention in the appropriate way. For example, the products of the invention may be used as the target for a potential drug, with the ability of the drug to inactivate or bind to the target indicating its potential antimicrobial activity.

[0023] The various products of the invention may also be used in veterinary applications.

[0024] The following is a brief overview of the experimental procedure used to identify the virulence genes.

[0025] Signature-tagged mutagenesis (STM) (Hensel et al., Science, 1995; 269: 400-403) was used to identify genes in N. meningitidis that are essential for septicemic infection. In STM, individual mutants are tagged with unique sequence identifiers, allowing large numbers of mutants to be analyzed simultaneously. However, it is necessary to construct libraries of insertional mutants, so far a limitation in studying N. meningitidis. Mutagenesis was accomplished successfully using a method in which Neisseria DNA is modified in vitro using purified components of Tn10 transposition. As N. meningitidis efficiently takes up exogenous DNA, the modified alleles are then introduced into N. meningitidis by transformation. The mutants can then be screened for their ability to cause systemic infection.

[0026] The vector pSTM115 (Sun et al. Nature Medicine, 2000; 6(11): 1269-1273) was used as the transposon donor for in vitro mutagenesis. 96 pSTM115 derivatives, each containing unique signature tags, were included in 96 separate transposition reactions. The modified genomic DNA was repaired, and returned to the host by transformation. To determine whether Tn10 insertion occurs at diverse sites, 40 transformants were assessed from a single transposition reaction by Southern blot analysis. Each had a single, distinct Tn10 insertion. To establish whether Tn10 integration was stable during systemic infection of infant rats, the hydridization patterns of six mutants before and after passage through rats were compared. Identical hybridization patterns before and after infection were obtained.

[0027] The experimental conditions used were as follows:

[0028] Bacterial Strains and Growth:

[0029] C311+ is an ET-5, serogroup B N. meningitidis isolate from a patient with invasive meningococcal infection (Virji et al., Mol. Microbiol., 1991; 5: 1831-1841). N. meningitidis was grown on brain-heart infusion medium with 5% Levinthal's supplement. E. coli strains were propagated on Luria Bertani media. Kanamycin was added to solid media as required at concentrations of 75 and 50 μg/ml for N. meningitidis and E. coli, respectively.

[0030] In Vitro Transposition and Insertion Site Characterization:

[0031] The pACYC184 origin of replication in pSTM115 was used to isolate the insertion site by marker rescue. Nucleotide sequencing was carried out using the dye-termination method (Perkin Elmer, Norwalk, Conn.) with primers NG62 (5′-TTGGTTAATTGGTTGTMCACTGG-3′) (SEQ ID NO. 209) or NG99 (5′-ATTCTCATGTTTGACAGCG-3′) (SEQ ID NO. 210). Homology searches were performed against protein databases (http://www.ncbi.nlm.nih.gov/), including the serogroup A and B N.meningitidis and the N. gonorrhoeae genome sequences (http://www.sanger.ac.uk/Projects/N_{—}meningitidis and http://www.tigr.org, and http://dna1.chem.ou.edu/gono.html, respectively).

[0032] Tag Amplification, Cloning and Southern Blot Analyses:

[0033] Hybridizations and preparations of dot blots were performed as described in Hensel et al., supra, except that tags were amplified with primers NG13 (5′-ATCCTACAACCTCAAGCT-3′) (SEQ ID NO. 211) and NG14 (5′-ATCCCATTCTAACCAAGC-3′) (SEQ ID NO. 212), and PCR products, rather than plasmid DNA, were fixed onto membranes. Oligonucleotides S1 (5′-AAGAGATTACGCGCAGACC-3′) (SEQ ID NO. 213) and S2 (5′-AATACGCMCCGCCTCTC-3′) (SEQ ID NO. 214) anneal to sequences in pSTM115 flanking the ‘signature tags’ and were used to amplify a 367-base-pair product from each pSTM115 derivative. For Southern blot analysis, the kanamycin-resistance cassette from pSTM115 was labelled using the random primers method (NEB), and was used as a probe against genomic DNA digested with Clal.

[0034] Animal Model:

[0035] For screening the STM pools, mutants were grown individually for 18 h in microtiter plates. The bacteria were pooled, then re-suspended in PBS. Wistar rats (5 days old) were inoculated intraperitoneally with 100 μl of the suspension, and were monitored for 48 h. To establish the competitive index of a mutant, wild-type and mutant bacteria were grown for 18 h on solid media and collected into PBS, and rats were inoculated with a 1:1 ratio of mutant to wild-type cells in a total inoculum of 5×10⁶ CFU. The proportion of mutant (kanamycin-resistant) to wild-type (kanamycin-sensitive) bacteria was determined by plating replicate samples to media with or without added antibiotic.

[0036] The results of the homology search s are shown in Table 1.

TABLE 1

| SEQ ID NO. | PROTEIN | ACCESSION NO. | ORGANISM |
|---|---|---|---|
| 3 & 4 | 3′dehydroquinate synthase | NMB0647 | N. gonorrhoeae |
| 25 & 26 | Glycosyl transferase | LSI2 | N. gonorrheae |
| 35 & 36 | Polyribonucleotide nucleotidyl | NMB0758 | N. meningitidis |
| | transferase | | |
| 37 & 38 | Phosphoribosyl formyl glycinamide | PURL | E. coli |
| | synthase | | |
| 43 & 44 | Shikimate dehydrogenase | AROE | N. meningitidis |
| 47 & 48 | Hypothetical 21.7 kD protein | NMB0673 | N. meningitidis |
| 53 & 54 | Putative cell binding factor | NMB0345 | N. meningitidis |
| 57 & 58 | Hypothetical protein | HI0633 | H. influenzae |
| 61 & 62 | Na+/H+ antiporter | NMBN0536 | N. meningitidis |
| 63 & 64 | Chorismate synthase | AROC | V. anguillarum |
| 67 & 68 | Paraquat-inducible protein B | PQ15B | E. coli |
| 71 & 72 | 5′-methyltetrahydropteroylyl | NMB0944 | N. meningitidis |
| | triglutamate-homocysteine methyl | | |
| | transferase | | |
| 79 & 80 | α-1,2 N-acetylglucosamine | RFAK | N. meningitidis |
| | transferase | | |
| 83 & 84 | Putative RNA methylase | NMB1348 | N. meningitidis |
| 89 & 90 | L-lactate permease | NMB0543 | N. meningitidis |
| 91 & 92 | ABC transporter | NMB1240 | N. meningitidis |
| 103 & 104 | Probable GTP-binding protein | HI0393 | H. influenzae |
| 109 & 110 | Capsule polysaccharide modification | LIPB | N. meningitidis |
| | protein | | |
| 113 & 114 | Hypothetical 17.8 kD protein | NMB0734 | N. meningitidis |
| 115 & 116 | E. coli hypothetical protein | YIGC | S. typhimurium |
| 119 & 120 | Ribonuclease III | NMB0686 | N. meningitidis |
| 121 & 122 | AMPD protein | NMB0668 | N. meningitidis |
| 123 & 124 | 5-methyltetrahydropteroylyl | NMB0944 | N. meningitidis |
| | triglutamate-homocysteine methyl | | |
| | transferase | | |
| 133 & 134 | Putative ATP-depenent RNA | NMB1422 | N. meningitidis |
| | helicase | | |
| 137 & 138 | Putative RNA methylase | NMB1348 | N. meningitidis |
| 141 & 142 | Shikimate dehydrogenase | AROE | N. meningitidis |
| 143 & 144 | Putative outer membrane protein | OMPU | N. meningitidis |
| 145 & 146 | TONB protein | TONB | N. meningitidis |
| 147 & 148 | Putative apolipoprotein N-acyl | NMB0713 | N. meningitidis |
| | transferase | | |
| 149 & 150 | Transposase | NMB0991 | N. meningitidis |
| 153 & 154 | UTP-glucose-1-phosphate | NMB0638 | N. meningitidis |
| | uridylyltransferase | | |
| 157 & 158 | ADP Heptose-LPS heptosyl | NMB1527 | N. meningitidis |
| | transferase II | | |
| 161 & 162 | Putative membrane-bound lytic | NMB1279 | N. meningitidis |
| | murein transglycosylase B | | |
| 171 & 172 | Putative cell-binding factor | NMB0345 | N. meningitidis |
| 173 & 174 | P-amino benzoate synthetase | PABB | H. pylori J99 |
| 177 & 178 | 5′-methyltetrahydropteroylyl | NMB0944 | N. meningitidis |
| | triglutamate-homocysteine methyl | | |
| | transferase | | |
| 183 & 184 | Conserved hypothetical protein | NMB0183 | N. meningitidis |
| 185 & 186 | E. coli hypothetical protein | YIGC | S. typhi LT2 |

[0037] For the remaining sequences identified herein, no homology results were obtained.

[0038] The gene products were used to produce polyclonal antibodies that were tested in an Elisa assay against various N. meningitidis strains to evaluate their effectiveness as a vaccine candidate. The strains used were:

[0039] Neisseria meningitidis (B) Type 1000

[0040] Neisseria meningitidis (B) Type NGE31

[0041] Neisseria meningitidis (B) Type NGH15

[0042] Neisseria meningitidis (B) Type SW2 107

[0043] Neisseria meningitidis (B) Type NHG38

[0044] Neisseria meningitidis (B) Type NGE28

[0045] Neisseria meningitidis (B) Type 2996

[0046] This provides information as to the variety of N. meningitidis strains that are recognised by these antibodies.

[0047] N. Meningitidis was grown on Columbia agar with chocolated horse blood (Oxoid) for 14 hours at 37° C. in 5% CO₂. The cells were scraped from agar plates and resuspended in 20 ml PBS in a 50 ml tube. The cell suspension was heated for 30 minutes at 56° C. to kill the bacteria.

[0048] A 50 μl sample of the heat-killed N. Meningitidis was spread on the Columbia agar with the chocolated horse blood and incubated for 18 hours at 37C, 5% CO₂. This allows confirmation that all N. Meningitidis cells have been killed. The OD₆₂₀ of the suspension is adjusted to 0.1 OD units versus PBS.

[0049] Elisa with Heat Killed N. meningitidis

[0050] Elisa assays were carried out using the heat-killed N. meningitidis using the following protocol. Elisa plates were coated overnight with heat-killed cells (50 μl of killed bacteria in PBS to each well of 96 well plate and incubated 4° C.).

[0051] Standard Elisa protocols were followed, with all incubations at 37° C. for 1 hour. PBS/3% BSA blocking solution, PBS/Tween 0.1% wash solution, anti-rabbit AP conjugate secondary antibody (Sigma) and Sigma Fast P Nitrophenyl phosphate detection reagent (Sigma) were utilised. The data was read at 405 nm using an appropriate micro-titre plate reader. The sera used was that available seven days after the first booster vaccination (day 35 after first vaccination).

[0052] The antibodies tested were those raised against the gene products identified as SEQ ID NOS. 8, 102, 140, 158 and 202. In each case, the results showed that the anti-sera recognised several different strains of N. meningitidis B.

[0053] Ex Vivo/In Vitro Screening.

[0054] Protection against meningococcal disease in humans has been associated with the presence of bacteriocidal antibodies against N. meningitidis (Goldscheider et al. J. Exp. Med., 1969; 129: 1307-1326). There is also evidence to suggest a correlation between the presence of detectable bacteriocidal activity and protection in an in vivo model (reference Martin, J. Bacteriol., 2000; 83: 27-31). Therefore, the antiserum generated was used to evaluate the bacteriocidal activity of the antibodies generated.

[0055] The bactericidal assays were performed with pre-immune sera and the corresponding rabbit antiserum raised against the candidat antigens. Commercially available rabbit serum was used as the complement source following pre-screening to eliminate complement only killing. Dulbecco's PBS (Gibco) was used as a buffer where necessary. The N. meningitidis strain MC58, was grown at 37° C. (5% CO₂) for 14 hours prior to use in the assay.

[0056] 200-400 CFU of MC58 in a 50 μl volume were incubated in the presence of complement (50 μl) with 100 μl of serial dilutions of heat-inactivated serum. Samples at time zero were plated to Columbia agar with chocolated horse blood (Oxoid). After incubation for 60 minutes, the number of surviving bacteria was evaluated by plating to Columbia agar with chocolated horse blood (Oxoid). The bacteriocidal activity was expressed in terms of percentage of bacteria surviving after 60 minutes. All samples were tested in duplicate and plated in triplicate. All appropriate positive and negative controls were utilised. In each test sample, the bacteriocidal activity was substantially greater than that for the pre-immune sera.

[0057] In Vivo Screening.

[0058] To evaluate the protective efficacy of vaccine candidates, adult mice were immunised with the recombinant proteins identified herein as SEQ ID NOS. 102 and 108 and the protective response determined by live bacterial challenge. For each vaccine candidate 15 six week old mice (6 week old balb/C mice) were vaccinated (subcutaneously) with 25 μg of antigen on two separate occasions at three week intervals.

[0059] One week after the end of the immunisation schedule, the group was challenged with the homologous bacterial strain MC58. The bacteria were inoculated intraperiponeally in a volume of 500 μl in Brain Heart Infusion/0.5% iron dextran media at a dose of 10⁷ cfu. Previous results have shown that iron is required for initiation of bacteraemic disease in these animals. This model has previously been used to demonstrate the protective efficacy of vaccination (Lissolo et al., Infect. Immujn., 1995; 63: 884-890).

[0060] Control groups included animals vaccinated with adjuvant alone (negative control) or with adjuvant combined with purified PorA (positive control). PorA is an outer membrane protein expressed exclusively by N. meningitidis and is the principal target for bactericidal antibodies induced by outer membrane vesicle vaccines. Monoclonal antibodies against PorA have also been shown to passively protect animals in the infant rat model. PorA however varies considerably between strains and so while it elicits some protection when challenged with a homologous strain, it is not an ideal vaccine candidate. Survival was monitored following challenge. The negative control showed no survival after 48 hours. Those vaccinated with PorA showed 6 survivors at 72 hours. Those vaccinated with the proteins of SEQ ID NOS. 102 and 108 showed 5 and 3 survivors, respectively.

The application's sequence listing, which the Patent Office published only in electronic form, follows.

SEQUENCE LISTING (214 sequences)

SEQ ID NO: 1 - DNA, 1674 bp, Neisseria meningitidis
  CDS (1)..(1674)
atgctgacctataccccgcccgatgcccgcccgcccgccaaaacccacgaaaagccgtggctgttgctgttgatggcgtttgcctggttgtggcccggcgtgttttcccacgatttgtggaatcctgacgaacctgccgtctataccgccgtcgaagcactggcaggcagccccacccctttggttgcccatctgttcggtcaaatcgatttcggcataccgcccgtgtatctttgggttgccgccgcgttcaaacatttgctgtcgccgtgggctgccgacccgtatgatgccgcacgctttgccggcgtgtttttcgccgttgtcggactgacttcctgcggctttgccggtttcaactttttgggcagacaccacgggcgcagcgtcgtcctgattctcatcggctgtatcgggctgattccgaccgtacactttctcaaccccgctgccgccgcctttgccgccgccggactggtgctgcacggttattctttggctcgccggcgcgtgattgccgcctcttttctgctcggtacgggttggacgctgatgtcgttggcagcagcttatccggcggcatttgccctgatgctgcccctgcccgtgctgatgtttttccgtccgtggcaaagcaggcgtttgatgttgacggcagtcgcctcgcttgcctttgccctgccgcttatgaccgtttacccgctgctcttggcaaaaacgcagcccgcgctgttcgcgcaatggctcgacgatcacgttttcggtacgttcggcggcgtgcggcacattcagacggcattcagtttgttttactatctgaaaaacctgctttggtttgcattgcctgcgctgccgctggcggtttggacggtttgccgcacgcgcctgttttcgaccgactgggggattttgggcgtcgtctggatgcttgccgttttggtgctgcttgccgtcaatccgcagcgttttcaggataacctcgtctggctgcttccgccgcttgccctgttcggcgcggcgcaactggacagcctgagacgcggcgcggcggcgtttgtcaactggttcggcattatggcgttcggactgtttgccgtgttcctgtggacgggctttttcgccatgaattacggctggcccgccaagcttgccgaacgcgccgcctatttcagcccgtattatgttcctgatatcgatcccattccgatggcggttgccgtactgttcacacccttgtggctgtgggcgattacccgcaaaaacatacgcggcaggcaggcggttaccaactgggcggcaggcgttaccctgacctgggctttgctgatgacgctgttcctgccgtggctggacgcggcgaaaagccacgcgcccgtcgtccggagtatggaggcatcgctttccccggaattaaaacgggagctttcagacggcatcgagtgtatcgacataggcggcggcgacctacacacgcggattgtttggacgcagtacggcacattgccgcaccgcgtcggcgatgtacaatgccgctaccgcatcgtccgcttgccccaaaacgcggatgcgccgcaaggctggcagacggtctggcagggtgcgcgcccgcgcaacaaagacagtaagttcgcactgatacggaaaaccggggaaaatatattaaaaacaacagat

SEQ ID NO: 2 - protein, 558 aa, Neisseria meningitidis
MLTYTPPDARPPAKTHEKPWLLLLMAFAWLWPGVFSHDLWNPDEPAVYTAVEALAGSPTPLVAHLFGQIDFGIPPVYLWVAAAFKHLLSPWAADPYDAARFAGVFFAVVGLTSCGFAGFNFLGRHHGRSVVLILIGCIGLIPTVHFLNPAAAAFAAAGLVLHGYSLARRRVIAASFLLGTGWTLMSLAAAYPAAFALMLPLPVLMFFRPWQSRRLMLTAVASLAFALPLMTVYPLLLAKTQPALFAQWLDDHVFGTFGGVRHIQTAFSLFYYLKNLLWFALPALPLAVWTVCRTRLFSTDWGILGVVWMLAVLVLLAVNPQRFQDNLVWLLPPLALFGAAQLDSLRRGAAAFVNWFGIMAFGLFAVFLWTGFFAMNYGWPAKLAERAAYFSPYYVPDIDPIPMAVAVLFTPLWLWAITRKNIRGRQAVTNWAAGVTLTWALLMTLFLPWLDAAKSHAPVVRSMEASLSPELKRELSDGIECIDIGGGDLHTRIVWTQYGTLPHRVGDVQCRYRIVRLPQNADAPQGWQTVWQGARPRNKDSKFALIRKTGENILKTTD

SEQ ID NO: 3 - DNA, 1077 bp, Neisseria meningitidis
  CDS (1)..(1077)
atgaaaacactgaccgtacacaccccgtcccacagctaccccatctttatcggcaacggactgctgccgcaggcaggaagcctgctcaaaccgcatttgggcaaacgcgccgccatcatcaccaacgaaaccgtcgccccgctctacctcggcacgcttcagacggcattggatgcggcaggcgtatcccatttcagcatcatcctgcccgacggcgaggcgcacaaaaactggcagacgctcaacctcatctttgacgggctgatgcaaaaccgcgccgaacgcaaaaccacgctcatcgcactgggcggcggcgtgatcggcgatatgacgggttttgcggcggctacttatcaacgcggcgcgccatttgttcaaattcccactactttattaagtcaggtcgattcctccgtcggcggcaaaaccgccatcaaccacccgctcggcaaaaatatgatcggcgcgttctaccagccgcaggcggtgcttgccgacttggacacgctgcacaccctgcccgcccgcgaactgtccgccggtatggcggaagtcatcaaatacggcacgctcggcgacattagtttttttgaatggctggaacagcatatgcccgaactgatggcactcgaacgcgcgcccctcatccaagccgtgtaccgctgttgccaaatgaaggcagacatcgtcgcccaagacgaaaccgaacagggcatacgcgcatggctcaacctcggacacaccttcggacacgccattgaaaccgagatgggttacggtacttggctgcacggcgaggccgtcgccgccggctgcgtgttggcggcgcgtttgtccgaacaactgggcaaaatctccgccgcagataccgcgcggctcgccgccctgctcgaagccgccggactgccgtccgcgccacccgtgtttgcctttgaaaaatggctggaacacatgagccacgataaaaaagtcagcggcggcatcatgcgctttatcggtctgaaccggctgggcgaagccaacatcaccgaaattaccgacacggacatcctccgccgcaccctgcaaccgtatctc

SEQ ID NO: 4 - protein, 359 aa, Neisseria meningitidis
MKTLTVHTPSHSYPIFIGNGLLPQAGSLLKPHLGKRAAIITNETVAPLYLGTLQTALDAAGVSHFSIILPDGEAHKNWQTLNLIFDGLMQNRAERKTTLIALGGGVIGDMTGFAAATYQRGAPFVQIPTTLLSQVDSSVGGKTAINHPLGKNMIGAFYQPQAVLADLDTLHTLPARELSAGMAEVIKYGTLGDISFFEWLEQHMPELMALERAPLIQAVYRCCQMKADIVAQDETEQGIRAWLNLGHTFGHAIETEMGYGTWLHGEAVAAGCVLAARLSEQLGKISAADTARLAALLEAAGLPSAPPVFAFEKWLEHMSHDKKVSGGIMRFIGLNRLGEANITEITDTDILRRTLQPYL

SEQ ID NO: 5 - DNA, 1053 bp, Neisseria meningitidis
  CDS (1)..(1053)
atgacacaccattaccccacagacgatattaagattaaagaagttaaagagttgttgccgccgattgcccatctttacgagctgccgatttccaaagaggcttcgggcttggttcaccgcacccgtcaggaaatttccgatttggttcacggcagggacaagcggctgttggttattatcgggccgtgttcgattcacgatccgaaagcggcgttggaatatgcggagcgtttgttgaaactccgcaagcagtatgaaaacgagcttttgattgtgatgcgcgtttatttcgagaagccgaggacgacggtgggttggaaaggtttgattaacgacccgcatttggacggtacgtttgacatcaatttcggtttgcgtcaggcacgcagcctgttgttgtcgctgaacaatatgggtatgcctgcctctaccgagtttttggatatgattacgccgcaatattatgcggacttgatttcttggggggcaatcggcgcgcggacgaccgaaagccaagttcaccgcgaattggcaagcgggctgtcctgccccgtcggctttaaaaacggtacggatggcaatttgaagattgccatcgacgcaatcggtgcggcgagccattcgcatcatttcctgtctgtaaccaaggccgggcattccgccattgtccataccggcggcaatcctgactgtcatgtcattttgcgcggcggaaaagagccgaattatgatgcgggacacgtcagcgaggcggcggaacaactgcgtgcggcaggcgtaaccgacaagctgatgattgattgcagccacgccaacagccgcaaggattacacccgacagatggaagtggcgcaagacattgccgcccaattggaacaggacggcggcaatattatgggcgtgatggtggaaagccatttggtcgaaggcaggcaggacaagccggaagtgtacggcaaaagcattaccgatgcgtgtattggttgggacgcgactgaagaactgttggcattgttggcaggtgcaaacaaaaaacgtatggcgcgcgccggt

SEQ ID NO: 6 - protein, 351 aa, Neisseria meningitidis
MTHHYPTDDIKIKEVKELLPPIAHLYELPISKEASGLVHRTRQEISDLVHGRDKRLLVIIGPCSIHDPKAALEYAERLLKLRKQYENELLIVMRVYFEKPRTTVGWKGLINDPHLDGTFDINFGLRQARSLLLSLNNMGMPASTEFLDMITPQYYADLISWGAIGARTTESQVHRELASGLSCPVGFKNGTDGNLKIAIDAIGAASHSHHFLSVTKAGHSAIVHTGGNPDCHVILRGGKEPNYDAGHVSEAAEQLRAAGVTDKLMIDCSHANSRKDYTRQMEVAQDIAAQLEQDGGNIMGVMVESHLVEGRQDKPEVYGKSITDACIGWDATEELLALLAGANKKRMARAG

SEQ ID NO: 7 - DNA, 1686 bp, Neisseria meningitidis
  CDS (1)..(1686)
atgttacaatccgaaaattcgaaaaatttaatctcttgttcaataaaggctttaccaatcatgatttctaccaacggcatcaccatgcagttcggcgcgaagccgctgtttgaaaacgtatccgttaaattcggcgaaggcaaccgctacggtttgatcggcgcgaacggctcaggcaaatccaccttcatgaaaatcctcggcggcgatttggaacagacagccggcgaagtggcgattgaaaacggcgtgcgtttgggtaaattgcgccaagaccagtttgcctacgaagatatgcgcgtgctggacgtggtaatgatgggtcacaccgaaatgtgggcggcgatgaccgaacgtgatgcgatttacgccaatcccgaagccaccgaagacgactacatgaaagccgcagaactggaagccaagttcgccgaatacgacggctacaccgccgaagcgcgtgccgccgagttgttgagcggcgtgggcatttccgaagatttgcacaatgcaaccatggcagaagttgccccgggcttcaaactgcgcgtattgctggcgcaagccctgttctccaagccggatgtattgctcttggacgaaccgaccaataacttggacattaataccatccgttggttggaaggcgtgttgaaccagtacgactccacgatgattatcatctcgcacgaccgccacttcttgaacgaagtctgcacgcatatggcagatttggattacaacaccatcaccatctatccgggcaactacgacgactatatgctcgcctccgcccaatcgcgcgaacgcgccctgaaagacaatgccaaggcgaaggaaaaattgcaggaattgcaagaatttgtggcgcggttcagtgccaacaaatccaaagcccgtcaggcaaccagccgtctgaaacaggcagacaaaatcaaatcggagatggtcgaggtcaaaccctctacccgtcaaaacccgtatatccgttttgaagccgatgaaaaagccaagctgcaccgtcaggctgtggaagttgaaaaactggcgaaacgctttgaaacccagttgtttaaaaacctgaactttatccttgaagcgggacaacgcctcgccatcatcggcccgaacggcgcgggcaaatccaccctgctgaaactcttggccggcgcgtacaaccccgaatattcagacggtctgctgccggacgaaggcagcatcaaatgggcggaaaaagccagcgtcggctactatccgcaagatcacgaaaacgacttcgatgtcgatatggatttgagcgaatggatgcgccaatgggggcaggacggcgacgacgaacaagtcatccgcggcactttggggcgtttgctcttcggcagtaacgatgtcgtgaaaaaagtgaaggttctctccggtggtgaaaaaggccgtatgctttacggcaaactgttgctgttgaaacccaatgtcttagtcatggatgaaccgaccaaccacatggacatggaaagcatcgaatccttgaacatggcgctggaaaaatacaacggcacgctgattttcgtctcccacgaccgtcagttcgtttcttccctggctacccaaatcattgaattggacggcaaaggcggatatgaacactacttgggcgattacgaaagctatctcgagaaaaaaggcgtagca

SEQ ID NO: 8 - protein, 562 aa, Neisseria meningitidis
MLQSENSKNLISCSIKALPIMISTNGITMQFGAKPLFENVSVKFGEGNRYGLIGANGSGKSTFMKILGGDLEQTAGEVAIENGVRLGKLRQDQFAYEDMRVLDVVMMGHTEMWAAMTERDAIYANPEATEDDYMKAAELEAKFAEYDGYTAEARAAELLSGVGISEDLHNATMAEVAPGFKLRVLLAQALFSKPDVLLLDEPTNNLDINTIRWLEGVLNQYDSTMIIISHDRHFLNEVCTHMADLDYNTITIYPGNYDDYMLASAQSRERALKDNAKAKEKLQELQEFVARFSANKSKARQATSRLKQADKIKSEMVEVKPSTRQNPYIRFEADEKAKLHRQAVEVEKLAKRFETQLFKNLNFILEAGQRLAIIGPNGAGKSTLLKLLAGAYNPEYSDGLLPDEGSIKWAEKASVGYYPQDHENDFDVDMDLSEWMRQWGQDGDDEQVIRGTLGRLLFGSNDVVKKVKVLSGGEKGRMLYGKLLLLKPNVLVMDEPTNHMDMESIESLNMALEKYNGTLIFVSHDRQFVSSLATQIIELDGKGGYEHYLGDYESYLEKKGVA

SEQ ID NO: 9 - DNA, 1632 bp, Neisseria meningitidis
  CDS (1)..(1632)
atgataaaaccgaacctgaggccgaagctcggctcttccgcgctgattgccttcctttccctgtattcctcgctggtattgaattacgccttttttgccaaagttgtcgagcttcatccttttaacggcaccggggcggatatcttcctctatacgatgccggtggtgctgttttttttaagtaatttcgtttttcacgtcattgccctgcctttcgtgcataaggtattgattccgttgatattggttatcagtgcggcggtgtcttaccaagaaatatttttcaatatctatttcaacaagtcgatgttgaataatgtcttgcaaactacggctgccgaaagcgcgcgcctgattacgccgggctatgtgctgtggattgtatgtttgggcgtattgcccgcgctggcgtatatcgccgtcaaggttaaataccgcgtttggtataaggagcttttgacgcgccttgtgcttgccgccgtttcctttttgtgcgcgttgggcatcgcaatgttgcaatatcaggattacgcctcgtttttccgcaacaataaatcagtaacccatctgattgtgccatctaatttcatcggcgcgggcgtgtcgaaatacaaagattggaagcgttccaatattccttatacgcaattggatatggcggtcgtgcaaaaccgcccggccggcagcctgcgccgtttcgtggtgctggtcgtgggcgagaccacgcgtgccgccaactggggtttgaacggttacagccgccaaactacgccgctgcttgccgcgcgcggcgatgaaattgtcaatttcccgcaggtcagaagctgcggtacatcgaccgcgcactccctgccgtgtatgttctcaaccttcgaccgcacggattatgacgaaatcaaagccgaacaccaagacaacctgctggacatcgtgcagcgcgccggcgtggaagttacctggttggaaaacgattccggctgcaagggcgtgtgcggcaaagtgccgaataccgacgttacctcgctcaacctgcccgaatactgccgcaacggcgagtgcctcgacaatatcctgctgaccaagttcgacgaagtcctcaacaaaaacgataaagacgcggttttaatcctgcataccatcggcagccacgggccgacgtattacgaacgctataccgaagccgaacgcaaattcacgccgacctgcgacaccaacgaaatcaacaaatgcacccgcgccacgctggtcaacacttacgacaatacggttttgtatgtggaccagtttatcgacaaggttatccgcaaacttgaaaaccgcgacgatttggaaagcgtggtgcattatgtttccgaccacggcgaaagtttgggcgaaaacgggatgtacctgcacgccgcgccttacgccatcgcgccttccgggcagacgcatatcccgatggttatgtggttttccaaagccttccgccaacacgggggcatagatttccaatgcctcaaacaaaaagcggcggaaaacgaatattcgcacgaccactatttcagcacggtattggggctgatggacatttccaacagccaaacctatcggaaggaaatggatatattggcagcctgccgccgtccgcgc

SEQ ID NO: 10 - protein, 544 aa, Neisseria meningitidis
MIKPNLRPKLGSSALIAFLSLYSSLVLNYAFFAKVVELHPFNGTGADIFLYTMPVVLFFLSNFVFHVIALPFVHKVLIPLILVISAAVSYQEIFFNIYFNKSMLNNVLQTTAAESARLITPGYVLWIVCLGVLPALAYIAVKVKYRVWYKELLTRLVLAAVSFLCALGIAMLQYQDYASFFRNNKSVTHLIVPSNFIGAGVSKYKDWKRSNIPYTQLDMAVVQNRPAGSLRRFVVLVVGETTRAANWGLNGYSRQTTPLLAARGDEIVNFPQVRSCGTSTAHSLPCMFSTFDRTDYDEIKAEHQDNLLDIVQRAGVEVTWLENDSGCKGVCGKVPNTDVTSLNLPEYCRNGECLDNILLTKFDEVLNKNDKDAVLILHTIGSHGPTYYERYTEAERKFTPTCDTNEINKCTRATLVNTYDNTVLYVDQFIDKVIRKLENRDDLESVVHYVSDHGESLGENGMYLHAAPYAIAPSGQTHIPMVMWFSKAFRQHGGIDFQCLKQKAAENEYSHDHYFSTVLGLMDISNSQTYRKEMDILAACRRPR

SEQ ID NO: 11 - DNA, 1052 bp, Neisseria meningitidis
  CDS (1)..(1050)
atgacacaccattaccccacagacgatattaagattaaagaagttaaagagttgttgccgccgattgcccatctttacgagctgccgatttccaaagaggcttcgggcttggttcaccgcacccgtcaggaaatttccgatttggttcacggcagggacaagcggctgttggttattatcgggccgtgttcgattcacgatccgaaagcggcgttggaatatgcggagcgtttgttgaaactccgcaagcagtatgaaaacgagcttttgattgtgatgcgcgtttatttcgagaagccgaggacgacggtgggttggaaaggtttgattaacgacccgcatttggacggtacgtttgacatcaatttcggtttgcgtcaggcacgcagcctgttgttgtcgctgaacaatatgggtatgcctgcctctaccgagtttttggatatgattacgccgcaatattatgcggacttgatttcttggggggcaatcggcgcgcggacgaccgaaagccaagttcaccgcgaattggcaagcgggctgtcctgccccgtcggctttaaaaacggtacggatggcaatttgaagattgccatcgacgcaatcggtgcggcgagccattcgcatcatttcctgtctgtaaccaaggccgggcattccgccattgtccataccggcggcaatcctgactgtcatgtcattttgcgcggcggaaaagagccgaattatgatgcgggacacgtcagcgaggcggcggaacaactgcgtgcggcaggcgtaaccgacaagctgatgattgattgcagccacgccaacagccgcaaggattacacccgacagatggaagtggcgcaagacattgccgcccaattggaacaggacggcggcaatattatgggcgtgatggtggaaagccatttggtcgaaggcaggcaggacaagccggaagtgtacggcaaaagcattaccgatgcgtgtattggttgggacgcgactgaagaactgttggcattgttggcaggtgcaaacaaaaaacgtatggcgcgcgccgg

SEQ ID NO: 12 - protein, 350 aa, Neisseria meningitidis
MTHHYPTDDIKIKEVKELLPPIAHLYELPISKEASGLVHRTRQEISDLVHGRDKRLLVIIGPCSIHDPKAALEYAERLLKLRKQYENELLIVMRVYFEKPRTTVGWKGLINDPHLDGTFDINFGLRQARSLLLSLNNMGMPASTEFLDMITPQYYADLISWGAIGARTTESQVHRELASGLSCPVGFKNGTDGNLKIAIDAIGAASHSHHFLSVTKAGHSAIVHTGGNPDCHVILRGGKEPNYDAGHVSEAAEQLRAAGVTDKLMIDCSHANSRKDYTRQMEVAQDIAAQLEQDGGNIMGVMVESHLVEGRQDKPEVYGKSITDACIGWDATEELLALLAGANKKRMARA

SEQ ID NO: 13 - DNA, 432 bp, Neisseria meningitidis
  CDS (1)..(432)
atggcatttggttcgatgaattccggcgacgattctccgatgtccgacatcaacgttacgccgttggtggacgtgatgctggtgttgctgattgtgtttatgattactatgccggtgctgacgcattccatccctttggaactgccgaccgcgtccgagcagacaaacaagcaggacaaacagcctaaagaccccctgcgcctgacgattgatgcgaacggcggctattatgtcggcggggattctgcaagcaaagtggaaatcggggaagtggaaagccgtctgaaagccgccaaggagcagaatgaaaacgtgattgtggcgattgcggcagacaaggcggtggaatacgattatgtaaacaaagctttagaagccgcccgtcaggcaggaatcaccaaaatcggttttgtaaccgaaaccaaggcgcaa

SEQ ID NO: 14 - protein, 144 aa, Neisseria meningitidis
MAFGSMNSGDDSPMSDINVTPLVDVMLVLLIVFMITMPVLTHSIPLELPTASEQTNKQDKQPKDPLRLTIDANGGYYVGGDSASKVEIGEVESRLKAAKEQNENVIVAIAADKAVEYDYVNKALEAARQAGITKIGFVTETKAQ

SEQ ID NO: 15 - DNA, 267 bp, Neisseria meningitidis
  CDS (1)..(267)
atgctcaaacaatccatcgaaatcatcaacaaactcggactccacgcccgcgcgtccaacaagttcacccaaaccgcgtcccaattcaaaagcgaagtctgggttacgaaaaacgacagccgcgtcaacggcaaaagcattatggggctgatgatgctcgccgccgccaagggtacggtcatcgaactggagacggacggcgcggacgaggcggaagcgatgcgcgccctgaccgacttaatcaacggctacttcggcgagggcgaa

SEQ ID NO: 16 - protein, 89 aa, Neisseria meningitidis
MLKQSIEIINKLGLHARASNKFTQTASQFKSEVWVTKNDSRVNGKSIMGLMMLAAAKGTVIELETDGADEAEAMRALTDLINGYFGEGE

SEQ ID NO: 17 - DNA, 633 bp, Neisseria meningitidis
  CDS (1)..(633)
atgcccatgaacctttttcaaaacgccaaattcttcacgacggtaaaccatctcaaagacctgccggacacaccgctcgaaattgcctttgtcggcaggagcaatgccggaaaatccagtgccatcaataccctgaccaaccatgtccgtcttgcctacgtttcaaaaacacccggacggacgcagcatatcaacttcttcgagctgcagaacggcaattttatggtcgatttgcccggctacggttatgcccaagtccccgaagcagtacgcgcacattgggtcaatctgctcggcgactatctgcaacagcgcaaacagcttatcgggctggttttgattatggatgcccgccatcctttaaaagaactcgacatccgtatgctggactttttccacacgaccggcagaccggttcacatcctgctgtcaaaagccgacaaattatccaaaaacgaacagataaaaaccctgtcccaagtcaaaaaactgctcaaaccttattccgacaggcaaaacatcagcgtacagctgttttccagcctgaaaaaacaaggtattgacgaggccaaccgaactgtcggaagctggtttgacgcagcagatgccgccgcttcctctccaaaggaaaac

SEQ ID NO: 18 - protein, 211 aa, Neisseria meningitidis
MPMNLFQNAKFFTTVNHLKDLPDTPLEIAFVGRSNAGKSSAINTLTNHVRLAYVSKTPGRTQHINFFELQNGNFMVDLPGYGYAQVPEAVRAHWVNLLGDYLQQRKQLIGLVLIMDARHPLKELDIRMLDFFHTTGRPVHILLSKADKLSKNEQIKTLSQVKKLLKPYSDRQNISVQLFSSLKKQGIDEANRTVGSWFDAADAAASSPKEN

SEQ ID NO: 19 - DNA, 621 bp, Neisseria meningitidis
  CDS (1)..(621)
atgaaacgattgactttattggcctttgttttggctgccggtgcggtttccgcatctcccaaagcagacgtggaaaaaggcaaacaggttgccgcaacggtttgtgcggcttgccatgcagcagacggtaacagcggcattgcgatgtatccgcgtttggcggcacagcatactgcttacatctatcatcaaaccatcggcatccgcgacggtaaacgcacccacggttcggcagctgtgatgaaaccggtggtaatgaatttgagcgatcaggatattttgaacgtatccgcattctatgccaaacagcagcccaaatccggtgaagccaatcctaaggaaaatcccgaattgggtgcgaaaatctatcgcggcggtttgagcgataaaaaagtgccggcgtgtatgtcctgccacggtccgagcggtgcgggtatgccggggggcggaagcgaaattcaggcttatccgcgtttgggcggtcagcatcaggcatatattgttgaacagatgaatgcctacaagtccggtcagcgtaaaaataccatcatggaagatattgcaaaccgtatgtctgaagaagatttgaaagcggtcgccaactttatccaaggtttgcgt

SEQ ID NO: 20 - protein, 207 aa, Neisseria meningitidis
MKRLTLLAFVLAAGAVSASPKADVEKGKQVAATVCAACHAADGNSGIAMYPRLAAQHTAYIYHQTIGIRDGKRTHGSAAVMKPVVMNLSDQDILNVSAFYAKQQPKSGEANPKENPELGAKIYRGGLSDKKVPACMSCHGPSGAGMPGGGSEIQAYPRLGGQHQAYIVEQMNAYKSGQRKNTIMEDIANRMSEEDLKAVANFIQGLR

SEQ ID NO: 21 - DNA, 765 bp, Neisseria meningitidis
  CDS (1)..(765)
atgccgtctgaagcccgatttttcaggcttcagacggcatttccccgtttgatttgcggtataatccgcctttacccattgtttgcaaagcacaatatgacacgcaaaatcctcgttacctccgccctgccctatgccaacggcagcatccacctcggccacatggtcgaacacatccaaaccgacgtttgggtgcgctttcaaaaactgcgcggcaacgaatgccactactgctgcgccgacgacacccacggcacgcccgtgatgcttgccgcgcaaaaacaaggcatcgcgcccgaagacatgattgccaaagtgcgcgaagagcacctcgccgactttactggctttttcatcggttacgacaattattacagcacccattcccctgaaaacaaacagttttcccaagacatttaccgcgcgctgaaagccaacggcaagattgagagccgcgtcatcgagcagcttttcgaccccgaaaaacaaatgttcctgcccgaccgcttcgttaaaggcgaatgcccgaaatgccacgcccaagaccaatacggcgacaactgcgaagtctgcggcacgacctattccccgaccgaactgattaacccgtattccgccgtttccggcgcgaaacccgaattgcgcgaatccgaacacttcttcttcaaactgggagaatgcgccgacttcctcaaagcatggacttccggcaacaacccgcacgacggcaagccccatctgcaagccgaagccctcaacaaaatg

SEQ ID NO: 22 - protein, 255 aa, Neisseria meningitidis
MPSEARFFRLQTAFPRLICGIIRLYPLFAKHNMTRKILVTSALPYANGSIHLGHMVEHIQTDVWVRFQKLRGNECHYCCADDTHGTPVMLAAQKQGIAPEDMIAKVREEHLADFTGFFIGYDNYYSTHSPENKQFSQDIYRALKANGKIESRVIEQLFDPEKQMFLPDRFVKGECPKCHAQDQYGDNCEVCGTTYSPTELINPYSAVSGAKPELRESEHFFFKLGECADFLKAWTSGNNPHDGKPHLQAEALNKM

SEQ ID NO: 23 - DNA, 1539 bp, Neisseria meningitidis
  CDS (1)..(1539)
atgaagtttttagaccgtgaggcaagcattgccaagccgggtttcaaccgttggctcgtaccgcccgcagcattggcggtacaccttgccatcgggcagatttacgcctattccgtattcaacgcgccgctgaccaaacttatcggcataaccgaatcggcggccggagattggaagctgacgaccgtaggttggattttcagtatcgcactcgcgatgctgggcgcgtcggccgccctgttcggtacgtggatggaacgggtagggccgcgcaaagccatatttgccgccgcctgctgtttcagcctgggcttcttcgtatccgcattcggcgtgcgtacgcacaacctcttcctgctctatttgggcaacggcgtcatcggcggcgtaggcttgggtttgggctacatcgggccggtttccacactgatgaaatggtttcccgacaagccgggtatggcgaccggtttggcgattatgggtttcggtggcggcgcaatgctggcctcgccgctttccgtatcactgatgaacaccttttcaaacgctacttcggttggggttgccgaaaccttcgccgtattgggtctgctttacctcgcactgatgatgttcggcgcgtttaccatccgcgtacctgccgacggctggaaacctgaaggctataccgcgccgaaaacgcaaaacaagctggtcagcagcaatcatgtcaacgtgtcccaagccatgaaaacgccgcagttttggctgttgttctgggtattgtgcctgaacgtaactgccggcatcggcgtattgggtcaggcatccgtgatgattcaggaactcttttccgaaacctccataggcaggcaggcggcagtcggcgcaggtgcggcggcaggcttcgtcagcctcctgagcctgtttaacatgggcggacgctttttgtggtcgagcgtttccgacaaaatcggacgcaaaaacacctacaccatcttcttcgtactcggttcgctgctgtatttcgccgttccctccatcggcgagggcggcagcaaagccctgttcatcatcggcttttgcgtgattatttccatgtacggcggcggatttgccgccattcccgcctacctgaaagacctgttcggcacctatcaggtcggcgcgattcacggacgcatcctgctggcctggtcaaccgccgccgtcatcggcccggtactggtcaattacatacgccaaagccaaatcgacagcggcataccggcggcacaggcatacagcgtaaccatgtacatcatggcgggtctgctgattatcggtttgttgtgcaacctcgccgtcaaatccgtacacgaaaaacaccacgaaaaagacatcaaaaccgccgcacacagcggcaaccccgatgacgaaaccgccatatccgacgcttaccttgtgggcgaaaaagtttccggcggcggcatatcggtctggtggcgttgggcattggccgtcataccgctcgcctacggcgtggtgatgatctttgtcaaagcactcgaccttttctcc

SEQ ID NO: 24 - protein, 513 aa, Neisseria meningitidis
MKFLDREASIAKPGFNRWLVPPAALAVHLAIGQIYAYSVFNAPLTKLIGITESAAGDWKLTTVGWIFSIALAMLGASAALFGTWMERVGPRKAIFAAACCFSLGFFVSAFGVRTHNLFLLYLGNGVIGGVGLGLGYIGPVSTLMKWFPDKPGMATGLAIMGFGGGAMLASPLSVSLMNTFSNATSVGVAETFAVLGLLYLALMMFGAFTIRVPADGWKPEGYTAPKTQNKLVSSNHVNVSQAMKTPQFWLLFWVLCLNVTAGIGVLGQASVMIQELFSETSIGRQAAVGAGAAAGFVSLLSLFNMGGRFLWSSVSDKIGRKNTYTIFFVLGSLLYFAVPSIGEGGSKALFIIGFCVIISMYGGGFAAIPAYLKDLFGTYQVGAIHGRILLAWSTAAVIGPVLVNYIRQSQIDSGIPAAQAYSVTMYIMAGLLIIGLLCNLAVKSVHEKHHEKDIKTAAHSGNPDDETAISDAYLVGEKVSGGGISVWWRWALAVIPLAYGVVMIFVKALDLFS

SEQ ID NO: 25 - DNA, 1038 bp, Neisseria meningitidis
  CDS (1)..(1038)
ttgcagcctttagtcagcgtattgatttgcgcctacaacgtagaaaaatatttcgcccaatcattagccaccgtcgtgaatcagacttggcgcaacttggagattttgattgtcgatgacggctcgacagacggtacgcttgccattgccaaggattttcaaaagcgggacagccgtatcaaaatccttgcacaagctcaaaattccggcctgattccctctttaaacatcgggctggacgaattggcaaagtcaggaatgggggaatatattgcacgcaccgatgccgacgatattgccgcccccgactggattgagaaaatcgtgggcgagatggaaaaagaccgcagcatcatcgcgatgggcgcgtggctggaagttttgtcggaagaaaaggacggcaaccggctggcgcggcatcacaggcacggcaaaatttggaaaaagccgacccggcacgaagatattgccgactttttccctttcggcaaccccatacacaacaacacgatgattatgcggcgcagcgtcattgacggcggattgcgttacaacaccgagcgggattgggcggaagattaccaattttggtacgatgtcagcaaattgggcaggctggcttattatcccgaagccttggtcaaataccgccttcacgccaatcaggtttcatccaaatacagcatccgccaacacgaaatcgcgcaaggcatccaaaaaaccgccagaaacgattttttgcagtctatgggttttaaaacccggttcgacagccttgaataccgccaaataaaagcagtagcgtatgaattgctggagaaacatttgccggaagaagattttgaacgcgcccgccggtttttgtaccaatgcttcaaacggacggacacgccgcccgccggcgcgtggctggatttcgcggcagacggcaagatgaggcggctgtttaccatgaggcaatacttcggcattttgcaccggctgattaaaaaccgccggcaggcgcggtcggattcggcagggaaagaacaggagatt

SEQ ID NO: 26 - protein, 346 aa, Neisseria meningitidis
LQPLVSVLICAYNVEKYFAQSLATVVNQTWRNLEILIVDDGSTDGTLAIAKDFQKRDSRIKILAQAQNSGLIPSLNIGLDELAKSGMGEYIARTDADDIAAPDWIEKIVGEMEKDRSIIAMGAWLEVLSEEKDGNRLARHHRHGKIWKKPTRHEDIADFFPFGNPIHNNTMIMRRSVIDGGLRYNTERDWAEDYQFWYDVSKLGRLAYYPEALVKYRLHANQVSSKYSIRQHEIAQGIQKTARNDFLQSMGFKTRFDSLEYRQIKAVAYELLEKHLPEEDFERARRFLYQCFKRTDTPPAGAWLDFAADGKMRRLFTMRQYFGILHRLIKNRRQARSDSAGKEQEI

SEQ ID NO: 27 - DNA, 1857 bp, Neisseria meningitidis
  CDS (1)..(1857)
atgccagaataccgctccaaaacctccacccacggtcgcaatatggcgggcgcgcgcgcgttgtggcgcgccaccggcgtgatggaaaccgacttcggcaaaccgattatcgccgttgccaactcgttcacccaattcgtgccaggtcatgtccacctgcacaatatgggccagctggttgcccgcgaaatcgaaaaagccggcgccatcgccaaagaattcaacaccatcgccatcgacgacggcatcgctatgggacacagcggtatgctgtattccctgcccagccgcgatttgattgccgactccatcgaatatatggtcaatgcccactgcgccgacgcgctggtgtgcatttccaactgcgacaaaatcaccccgggcatgctgattgccgcgatgcgcctgaacatcccgaccatcttcgtttccggcggtccgatggaagcaggtaaagttatcggcgtggcaaacatccagcccgaacgccgtttggacttgattgacgcgatgattgaatcggcggacgacaatatcagcaaccggcaagttgaagaagtcgaacaaaacgcctgcccgacctgcggctcgtgttcgggtatgtttacggcaaactcgatgaactgcctgaccgaagcactcgggctgtccctgccgggcaacggttcttacctcgccacccacgtcggccgcaaagaactgttcctcgaagccggccgtatgattgtcgaaatcaccaaacgctattacgagcaaaacgatgaaaccgtgttaccgcgcagcattgccaccaaaaaagcgtttgaaaacgctatgaccatggacattgccatgggcggcagcaccaacactattttgcatttactcgccgttgccaacgaagcgggcgtggatttcaaaatggcagacatcgaccgcttaagccgcgttgtgccctgcatctgcaaaaccgcacccaacaaccacgactactatatggaagacgtgcaccgagccggcggcatcttcgccatcctgaaagaattggacaaagcgggcaagctgcacaccgacgtgcacactatccacgcgccgacgctgaaagacgcgattgaaaaatgggacgtaaccaaccctgaaaacacccacgccatcgaacgcttcaaagccgcgcccggcggcgtacgcaccacccaagcgttctcgcaaaaccgtatgtggaaaaccctcgacctcgaccgcgaaaaaggctgtatccgcgacgtggcacacgcctactcgcaagacggcggtttggcggtcttgttcggcaacatcgccgagcgcggctgcgtggtaaaaaccgcaggcgtggacgagagcatcctcaaattcaccggccgcgcccgcgtgtttgaaagccaagaagacgcagtagaaggcattttgggcaaccaaatcgtcgccggcgacatcgtcatcatccgctacgaaggcccgaaaggcggcccgggcatgcaggaaatgctgtatccgacttcctacctgaaatctaaaggcctcggcaaagcctgcgctctcttaaccgacggacgcttctccggcggcacatcaggtttgtccatcggacacgcctcgcccgaagcggcggaaggtggcgcgatcggtttggtacacgaaggcgataccgtcgaaatcgacatccccaaccgcagcatccgccttgtcatttccgacgaagaactcgccgcccgccgtgccgaaatggaagcacgcggcagcaaagcgtggaaaccggaaaaccgcgaccgctacgtctccgccgcattaagagcttacggcgcgatggcgacttccgccgacaaaggcgcggtgcgcgacgtagcgcaaatcgaaaga

SEQ ID NO: 28 - protein, 619 aa, Neisseria meningitidis
MPEYRSKTSTHGRNMAGARALWRATGVMETDFGKPIIAVANSFTQFVPGHVHLHNMGQLVAREIEKAGAIAKEFNTIAIDDGIAMGHSGMLYSLPSRDLIADSIEYMVNAHCADALVCISNCDKITPGMLIAAMRLNIPTIFVSGGPMEAGKVIGVANIQPERRLDLIDAMIESADDNISNRQVEEVEQNACPTCGSCSGMFTANSMNCLTEALGLSLPGNGSYLATHVGRKELFLEAGRMIVEITKRYYEQNDETVLPRSIATKKAFENAMTMDIAMGGSTNTILHLLAVANEAGVDFKMADIDRLSRVVPCICKTAPNNHDYYMEDVHRAGGIFAILKELDKAGKLHTDVHTIHAPTLKDAIEKWDVTNPENTHAIERFKAAPGGVRTTQAFSQNRMWKTLDLDREKGCIRDVAHAYSQDGGLAVLFGNIAERGCVVKTAGVDESILKFTGRARVFESQEDAVEGILGNQIVAGDIVIIRYEGPKGGPGMQEMLYPTSYLKSKGLGKACALLTDGRFSGGTSGLSIGHASPEAAEGGAIGLVHEGDTVEIDIPNRSIRLVISDEELAARRAEMEARGSKAWKPENRDRYVSAALRAYGAMATSADKGAVRDVAQIER

SEQ ID NO: 29 - DNA, 1725 bp, Neisseria meningitidis
  CDS (1)..(1725)
atgcagctatcaggcgcgcaaatcatagtgcagagtctcaaagccgaaggtgtcgagtacgttttcggttatcccggcggtgcggttatcgaaatctacgatgcccttttccaactcaataaattcaagcacattctgacccgtcacgagcaggcggcagtacacgcggcagatgcgtatgcgcgcgtcagcggtaaggtgggcgtggcattggttacatccggcccgggcgttaccaatgcactgaccggtattgctactgcctatacggattcgattccgatggtggtcatcagcgggcaggtaggcaattccctgattggtacggatgcgttccaagaagttgatacggtgggtattacccgtccgtgcgtcaaacacaatttcctggttacggacatcaatgagttggcggaaaccattaaaaaggcgttccaaattgccgcaagcggccgaccggggcccgtggtggttgatgtcccgaaagatgttacgcaggcgatggcgaaattcagctatcctcaggaagacatttttatccgttcgtatcaaccggttgttcaagggcatatcggtcagattaaaaaggccgtgcagatgttggcatctgccaaacgtccggtcgtctattttggcggcggcgtggtgttgggtaatgcttctgaagagctgacccgatttgtccgaatgacgggtgctccgtgcacgggtacgctgatgggcttgggcgcttatccttccggcgaccgccaattcctcggtatgctcggtatgcacggtacttacgaggcaaaccttgccatgcagaatgcggatgtcgttcttgccgtaggtgcgcgttttgacgaccgtgtggtttccgtaccgtccaaatttttcgagaaggcgaagaaggttatccatatcgatgtcgatccttccagcatcgccaaacgcgtgaaggcggacattccgattgtcggcgacgtgaaaaacgttttgtccgagatggttgcgctgtggcaaaaacaagagtccgtgccgtctgaagatgctttgggcaaatggtggaaaaccatagaggaatggcgttcccgcgattgcttgtggtttgacaacggcagcgaaattatcaagccacaatatgtgattcagaagcttgccgagattaccggcaattcggcaatcatcacatcggatgtagggcagcatcaaatgtttgcggctcaatattatcccttcgaacgtccgcgccaatggctcaactccggcggtttgggtacgatgggcgttggtctgccttatgcgattggtgcaaaacttgccgccccggatcaagacgtattctgtattaccggcgacggctcgatccagatgaacatccaagagctgtccacctgtttccaatatcggattccggttaacgtcattacgctgaacaacggttatctcggtatggtacgccagtggcaggaaatatattacggcggacgagagtcggaaacctatttcgattctttgcccgatttcgtcaaacttgccgaggcatacggccatatcggtatccgcgtggacaagaagtctgatgtggaaggtgcgttgttggaagcattgaaccaaaaagacaggctggtgtttatcgacttcctgaccgaccagaaacagaatgtgatgcccatggtcggcaacggcaaaggtttggacgaaatggtacttccgccgcatatgcgtgcggacggaaaggcg

SEQ ID NO: 30 - protein, 575 aa, Neisseria meningitidis
MQLSGAQIIVQSLKAEGVEYVFGYPGGAVIEIYDALFQLNKFKHILTRHEQAAVHAADAYARVSGKVGVALVTSGPGVTNALTGIATAYTDSIPMVVISGQVGNSLIGTDAFQEVDTVGITRPCVKHNFLVTDINELAETIKKAFQIAASGRPGPVVVDVPKDVTQAMAKFSYPQEDIFIRSYQPVVQGHIGQIKKAVQMLASAKRPVVYFGGGVVLGNASEELTRFVRMTGAPCTGTLMGLGAYPSGDRQFLGMLGMHGTYEANLAMQNADVVLAVGARFDDRVVSVPSKFFEKAKKVIHIDVDPSSIAKRVKADIPIVGDVKNVLSEMVALWQKQESVPSEDALGKWWKTIEEWRSRDCLWFDNGSEIIKPQYVIQKLAEITGNSAIITSDVGQHQMFAAQYYPFERPRQWLNSGGLGTMGVGLPYAIGAKLAAPDQDVFCITGDGSIQMNIQELSTCFQYRIPVNVITLNNGYLGMVRQWQEIYYGGRESETYFDSLPDFVKLAEAYGHIGIRVDKKSDVEGALLEALNQKDRLVFIDFLTDQKQNVMPMVGNGKGLDEMVLPPHMRADGKA

SEQ ID NO: 31 - DNA, 651 bp, Neisseria meningitidis
  CDS (1)..(651)
atgttttccgtaccgcgttcctttttgccgggcgttttcgtacttgccgcgcttgccgcctgcaaacctcaagacaacagtgcggcgcaagtcgcttcttcaagtgcatccgcgtcggctgcggaaaatgcggcaaagccgcaaacgcgcggtacggatatgcgtaaggaagacatcggcggcgatttcacgctgaccgacggcgaaggcaagcctttcaacctgagcgatttgaaaggcaaggtcgtgattctgtctttcggctttacgcactgtcccgatgtctgcccgacagagcttttgacgtacagcgacacgttgaagcagttgggcgggcaggctaaggacgtgaaagtggtgttcgtcagcatcgatccggaacgcgacacgcctgaaatcatcggcaagtatgccaaacagttcaatccggactttatcggtctgacggcaacgggcgaccaaaacctgccggtcatcaagcagcaataccgcgtggtttctgccaaagtcaatcaaaaagacgacagcgaaaactatttggtcgaccactcttccggtgcgtatctcatcgacaaaaacggtgaggttgccattttctcgccttacggaagcgagccggaaacgattgctgccgatgtaaggaccctgctc

SEQ ID NO: 32 - protein, 217 aa, Neisseria meningitidis
MFSVPRSFLPGVFVLAALAACKPQDNSAAQVASSSASASAAENAAKPQTRGTDMRKEDIGGDFTLTDGEGKPFNLSDLKGKVVILSFGFTHCPDVCPTELLTYSDTLKQLGGQAKDVKVVFVSIDPERDTPEIIGKYAKQFNPDFIGLTATGDQNLPVIKQQYRVVSAKVNQKDDSENYLVDHSSGAYLIDKNGEVAIFSPYGSEPETIAADVRTLL

SEQ ID NO: 33 - DNA, 330 bp, Neisseria meningitidis
  CDS (1)..(330)
ttgccgctgctttgttgtctttggttttggcagcctgcggcggtgaaaaagccgctgaagctcccgctgctgaagcacctgccgccgaagctcccgctactgaagcacctgccgccgaagctcccgctgctgaagcacctgccgccgaagctcctgctactgaagcacctgccgccgaagctcccgctgctgaagctgccgctaccgaagcacctgccgctgaagctgccgctaccgaagcacctgccgctgaagctcctgctgccgaagctgcaaaataagcattttccgcttgcaaaaaagcaggatacgttcagtatcctgcttttt

SEQ ID NO: 34 - protein, 110 aa, Neisseria meningitidis
LPLLCCLWFWQPAAVKKPLKLPLLKHLPPKLPLLKHLPPKLPLLKHLPPKLLLLKHLPPKLPLLKLPLPKHLPLKLPLPKHLPLKLLLPKLQNKHFPLAKKQDTFSILLF

SEQ ID NO: 35 - DNA, 2118 bp, Neisseria meningitidis
  CDS (1)..(2118)
atgttcgacaaacacgttaagaccttccaatacggtaatcagaccgttactttggaaaccggcgaaattgcccgccaagccgccgctgccgttaaagtctctatgggcgacaccgtggttttggttgccgttaccaccaacaaagaagtgaaagaaggccaagacttcttccccctgaccgtcgattatttggaacgcacttacgccgcaggtaaaatccccggcggtttcttcaaacgcgaaggcaaacaaagcgaaaaagaaatcctgaccagccgtctgatcgaccgcccgattcgtccgctgttccccgaaggtttctaccacgacatccaaatcgtagcgatggtcgtgtccgtcgatcccgaaatcgattccgacattcctgcaatgttgggcgcgtctgccgcgctggtgttgagcggcgtaccgtttgccggtccgattggtgcggcacgcgtgggttatataaacggcgtgtacgttttgaacccgactaaagccgaattggcgaaatcgcaattggacttggtggtcgccggtacttcaaaagccgtgttgatggtggaatccgaagccaaaatcctgcccgaagacgtgatgctgggcgcggtggtttacggccacgatcaaatgcaggttgccatcaatgcaatcaatgaatttgccgacgaagtcaatccggaactttgggattggaaagcacctgaaaccaatgaggaactggttgccaaagtccgcgggattgccggcgaaaccattaaagaagcgttcaaaatccgtcaaaaacaagcgcgttctgccaaattggacgaagcttggagtgcggtaaaagaagccttgattaccgaagaaaccgacacgctggcagccaacgaaatcaaaggcattttcaaacacttggaagccgatgtcgtccgcagccaaattttggacggccaaccgcgcatcgacggccgcgacacccgcaccgtccgtccgctgaacatccaaaccggcgtattgccgcgcacgcacggttccgcattgtttacccgtggcgaaacccaagcccttgccgtagcgactttgggtacttcgcgcgacgagcaaatcatcgacgcgctgtccggcgaatacaccgaccgctttatgctgcactacaactttccgccgtactctaccggcgaagtgggccgcatgggcgcgccgaaacgccgtgaaatcggtcacggtcgtttggctaaacgtgcattgttggccgtattgccgaaacctgaagatttcagctacaccatgcgcgtggtctccgaaattaccgaatccaacggctcttcctctatggcttccgtctgcggcggctgcttgagcctgctgtccgccggcgtgcctttgaaagcacacgttgccggtatcgcgatgggtctgattctggaaggcaataagtttgccgtcctgaccgacattttgggcgacgaagaccacttgggcgatatggactttaaagtggctggtacgaccgaaggcgttaccgcgctgcaaatggacatcaaaatccaaggcattaccaaagagattatgcaaatcgctttggcgcaggccaaagaagcgcgtctgcacatcttggatcagatgaaagccgccgttgcgggcccgcaagagctgtccgcacacgcgccacgcttgttcacgatgaaaatcaaccaagacaaaatccgcgaagttatcggtaagggcggtgaaaccatccgtgcgattaccgctgaaaccggtacggaaatcaatattgccgaagacggtacgattaccattgccgcaaccactcaagaagccggcgatgcggcgaaaaaacgcatcgagcagattactgccgaagtggaagtgggcaaagtgtacgaaggcactgtggtgaaaatcctcgacaacaatgtcggcgcgattgtcagtgtgatgccgggcaaagacggtttggtacacatcagccaaatcgcccacgagcgcgtacgcaatgtcggcgactacctgcaagtcggtcaggtggtgaacgtgaaagcattggaagtggacgacagaggccgtgtccgtctgtccatcaaagccctgctggacgcgcctgcccgtgaggaaaatgccgccgag

SEQ ID NO: 36 - protein, 706 aa, Neisseria meningitidis
MFDKHVKTFQYGNQTVTLETGEIARQAAAAVKVSMGDTVVLVAVTTNKEVKEGQDFFPLTVDYLERTYAAGKIPGGFFKREGKQSEKEILTSRLIDRPIRPLFPEGFYHDIQIVAMVVSVDPEIDSDIPAMLGASAALVLSGVPFAGPIGAARVGYINGVYVLNPTKAELAKSQLDLVVAGTSKAVLMVESEAKILPEDVMLGAVVYGHDQMQVAINAINEFADEVNPELWDWKAPETNEELVAKVRGIAGETIKEAFKIRQKQARSAKLDEAWSAVKEALITEETDTLAANEIKGIFKHLEADVVRSQILDGQPRIDGRDTRTVRPLNIQTGVLPRTHGSALFTRGETQALAVATLGTSRDEQIIDALSGEYTDRFMLHYNFPPYSTGEVGRMGAPKRREIGHGRLAKRALLAVLPKPEDFSYTMRVVSEITESNGSSSMASVCGGCLSLLSAGVPLKAHVAGIAMGLILEGNKFAVLTDILGDEDHLGDMDFKVAGTTEGVTALQMDIKIQGITKEIMQIALAQAKEARLHILDQMKAAVAGPQELSAHAPRLFTMKINQDKIREVIGKGGETIRAITAETGTEINIAEDGTITIAATTQEAGDAAKKRIEQITAEVEVGKVYEGTVVKILDNNVGAIVSVMPGKDGLVHISQIAHERVRNVGDYLQVGQVVNVKALEVDDRGRVRLSIKALLDAPAREENAAE

SEQ ID NO: 37 - DNA, 3972 bp, Neisseria meningitidis
  CDS (1)..(3972)
gtgagccgaattatgtctgtcgttttgcccttgcgcggcgttaccgccctttccgatttccgtgttgaaaaactcttgcaaaaagccgccgcactcggtctgcccgaagtcaaattaagcagcgaattttggtatttcgtcggcagcgagaaagcacttgatgccgcgactgtcgaaaaactgcaagccttgttggcggcgcaaagcgttgaacaaacgccaaaagcgcgcgagggcttgcatttgtttttggtcacgccccgtttgggtacgatttcgccgtgggcttccaaggcgaccaatatcgcggaaaactgcggtttggcaggcatcgaacgcatcgagcgcggcatggcggtgtggctggaaggtgcgcttaccgatgaacagcaacagcaatgggcggctttgctgcacgaccgcatgactgaatccgtgctgcccgattttcagacggcatccaaattattccaccatctcgaatccgaaaccttttccaccgtcgatgttttgggcggcggtaaagaggctttggtcaaagccaataccgaaatgggtttggcactctccgccgacgaaatcgattatctggttgaaaactatcaggctttgcagcgcaatccgtctgatgtggagctgatgatgttcgcgcaggcaaacagcgaacactgccgccacaaaatcttcaacgccgacttcatcctcaacggcgaaaaacagccgaaatcgctcttcggtatgatacgcgacacgcacaacgcgcatcccgaaggcacagtcgttgcctacaaagacaactcatccgtgatcgaaggcgcaaaagtcgaacgtttctatccaaatgcggcagaaaaccaaggctaccgtttccacgaggaagacacgcatatcatcatgaaagtggaaacgcacaaccacccgaccgccatcgcgccgtttgcgggcgcggcaacgggcgcgggcggcgaaatccgcgacgaaggtgcgacgggcaaaggttcgcgtccgaaagcaggcttgaccggctttaccgtgtccaacctcaacatccccggcctcaaacagccgtgggaacaagattacggcaagccggaacatatttcctcgccgctggacattatgattgaaggccccatcggcggcgcggcgttcaacaacgaattcggccgccccaacctcttgggctacttccgcacttttgaagaaaaatttgacggtcaggttcgcggctaccacaaaccgattatgattgccggcggcttgggcagcattcaggcgcagcagacgcataaagacgaaatccccgaaggcgcgttgctgatccaactgggcggcccgggtatgcttatcggcttgggcggcggcgcggcttcttcgatggataccggcacaaacgacgcgtctttagacttcaactccgtacaacgcggcaaccccgaaatcgaacgccgcgcgcaggaagtgatcgaccgctgctggcagctcggcgacaaaaacccgattatctccatccacgacgttggcgcgggcggcttgtccaacgccttccccgaactcgtcaacgatgccggacgcggcgcggtattcaagctgcgcgaagtgccgctggaagaacacggtctcaacccgctgcaaatctggtgcaacgaatcgcaagagcgttatgtattgtcgattttggaaaaagatttggacatcttccgctccatctgcgaacgtgaacgctgcccgtttgcggtagtcggtacggcgaccgacgacggccatttgaaagtacgcgacgatttgttctccaacaaccctgtcgatttgccgttgaacgtcttgctcggcaaaccgcccaaaaccacgcgtaccgacaaaacggttgcgccgtccaaaaaaccgtttcacgcgggcgatatcgacattactgaagccgcctaccgcgttctgcgcctgcctgccgtagccgccaaaaacttcctgattaccatcggcgaccgcagcgtcggcggcatgacccaccgcgaccaaatggtcggcaaataccaaacccccgtagccgactgcgccgttaccatgatgggcttcaacacttatcgcggcgaagcgatgagcatgggcgaaaaaccgaccgtcgccctgtttgacgcgcctgcttcgggcagaatgtgcgtcggcgaagccatcaccaacatcgcggcagccaatatcggcgacatcggcaacatcaaactctccgccaactggatggcggcgtgcggcaacgaaggcgaagacgaaaaactctaccgcaccgtcgaagcggtttccaaagcctgtcaggcattggatttgagcattcccgtgggcaaagacagcctgtcgatgaaaaccgtgtggcaggacggcgaagagaaaaaatccgtcgtttcgccgttgagcctgattatctccgcgttcgcgccggttcaagacgtacgcaaaaccgttacgcccgaattgaaaaacgtcgaggacagcgtattgctgtttgtcgatttgggcttcggcaaagcgcgtatgggcggctcggcgtttggtcaggtgtacaacaatatgagcggcgacgcgcccgatttggacgatacaagtcgtctgaaagcgttttacaacgtgattcagcagcttgtcgccgaagacaaactcttggcgtatcacgaccgcagcgacggcggcttgtttgccgttttggtagaaatggcgtttgcagggcggtgcggcttggatatagatttaaatttattgcttgcacaaacatttattaccaaccataccgctctgtctcaatcattgcggactgaagaggtaaaagcgttggctgaatggcaagaaaccattgcccgcacattatttaatgaagagttgggtgctgttatccaagttagaaaacaagatgttgccgatattatcaatttattctatcaacaacagctgcatcataatgtctttgaaatcggtacgttaactgatgagaacacgttaatcatccgcgacgggcaaacgcaccttatttctgacaacctaatcaaactgcaacaaacctggcaagaaaccagccatcaaatccaacgcctgcgcgacaaccctgcctgcgccgacagcgagtttgccctgattggcgacaacggacgcagcgcattgtttgccaacctgaaattcgacgtgaacgaagacatcgccgcgccgtttatcaacagcggcgcgaaacccaaaatcgccatcctgcgcgaacagggcgtaaacgggcaaatcgaaatggccgccgccttcacccgtgccggtttcgatgcctacgacgtgcatatgtccgacctgatggcaggccgcgtccaccttgccgacttcaaaatgctggcggcgtgcggcggcttcagctacggcgacgtactcggcgcgggcaaaggctgggcgaaatccatcctgttccaccccgccttacgcgaccagttcgccgccttcttcaccgacccgaacacgctgacattgggcgtgtgcaacggctgccagatggtcagcaacctcgccgaaatcatccccggcacggcaggctggccgaagttcaagcgcaacctgagcgaacagttcgaagcgcgcctgagcatggttcacgtccccaaatcagcctccctgattctgaacgaaatgcaaggctccagcctgcccgtcgtcgtcagccacggcgaaggccgcgccgacttcgcgcttcacggcggcaacatttctgccgatttgggcattgcgttgcaatatgtggacggacaaaaccaaattacccaaacctacccgctcaaccccaacggctcgccgcaaggcatcgccggcgtgaccaacgccgacggccgcgttaccatcatgatgccgcatcctgaacgtgtataccgcgccgcacaaatgagctggaaaccggaagactggacggaattgtccggctggtaccgcctcttcgccggcgcacgtaaagccttgggc

SEQ ID NO: 38 - protein, 1324 aa, Neisseria meningitidis
VSRIMSVVLPLRGVTALSDFRVEKLLQKAAALGLPEVKLSSEFWYFVGSEKALDAATVEKLQALLAAQSVEQTPKAREGLHLFLVTPRLGTISPWASKATNIAENCGLAGIERIERGMAVWLEGALTDEQQQQWAALLHDRMTESVLPDFQTASKLFHHLESETFSTVDVLGGGKEALVKANTEMGLALSADEIDYLVENYQALQRNPSDVELMMFAQANSEHCRHKIFNADFILNGEKQPKSLFGMIRDTHNAHPEGTVVAYKDNSSVIEGAKVERFYPNAAENQGYRFHEEDTHIIMKVETHNHPTAIAPFAGAATGAGGEIRDEGATGKGSRPKAGLTGFTVSNLNIPGLKQPWEQDYGKPEHISSPLDIMIEGPIGGAAFNNEFGRPNLLGYFRTFEEKFDGQVRGYHKPIMIAGGLGSIQAQQTHKDEIPEGALLIQLGGPGMLIGLGGGAASSMDTGTNDASLDFNSVQRGNPEIERRAQEVIDRCWQLGDKNPIISIHDVGAGGLSNAFPELVNDAGRGAVFKLREVPLEEHGLNPLQIWCNESQERYVLSILEKDLDIFRSICERERCPFAVVGTATDDGHLKVRDDLFSNNPVDLPLNVLLGKPPKTTRTDKTVAPSKKPFHAGDIDITEAAYRVLRLPAVAAKNFLITIGDRSVGGMTHRDQMVGKYQTPVADCAVTMMGFNTYRGEAMSMGEKPTVALFDAPASGRMCVGEAITNIAAANIGDIGNIKLSANWMAACGNEGEDEKLYRTVEAVSKACQALDLSIPVGKDSLSMKTVWQDGEEKKSVVSPLSLIISAFAPVQDVRKTVTPELKNVEDSVLLFVDLGFGKARMGGSAFGQVYNNMSGDAPDLDDTSRLKAFYNVIQQLVAEDKLLAYHDRSDGGLFAVLVEMAFAGRCGLDIDLNLLLAQTFITNHTALSQSLRTEEVKALAEWQETIARTLFNEELGAVIQVRKQDVADIINLFYQQQLHHNVFEIGTLTDENTLIIRDGQTHLISDNLIKLQQTWQETSHQIQRLRDNPACADSEFALIGDNGRSALFANLKFDVNEDIAAPFINSGAKPKIAILREQGVNGQIEMAAAFTRAGFDAYDVHMSDLMAGRVHLADFKMLAACGGFSYGDVLGAGKGWAKSILFHPALRDQFAAFFTDPNTLTLGVCNGCQMVSNLAEIIPGTAGWPKFKRNLSEQFEARLSMVHVPKSASLILNEMQGSSLPVVVSHGEGRADFALHGGNISADLGIALQYVDGQNQITQTYPLNPNGSPQGIAGVTNADGRVTIMMPHPERVYRAAQMSWKPEDWTELSGWYRLFAGARKALG

SEQ ID NO: 39 - DNA, 471 bp, Neisseria meningitidis
  CDS (1)..(471)
atgtcccgcaataccgaagagctgcaaggcatctcgcttttgggtaatcagaaaacccgatatccgaccggctacgcgcctgaaattctcgaagcattcgacaacaaacatcccgacaacgactatttcgtcaaattcgtctgcccagagttcaccagcctctgccccatgaccgggcagcccgacttcgccaccatctacatccgctacattccgcacatcaaaatggtggaaagcaaatccctgaaactctacctcttcagcttccgcaaccacggcgattttcatgaagactgcgtcaacatcatcatgaaagacctcattgccctgatggatccgaaatacatcgaagtattcggcgagttcacaccgcgcggcggcatcgccattcatcctttcgccaattacggcaaagcaggcaccgagtttgaagcattggcgcgtaaacgcctgtttgagcacgacgcacaa

SEQ ID NO: 40 - protein, 157 aa, Neisseria meningitidis
MSRNTEELQGISLLGNQKTRYPTGYAPEILEAFDNKHPDNDYFVKFVCPEFTSLCPMTGQPDFATIYIRYIPHIKMVESKSLKLYLFSFRNHGDFHEDCVNIIMKDLIALMDPKYIEVFGEFTPRGGIAIHPFANYGKAGTEFEALARKRLFEHDAQ

SEQ ID NO: 41 - DNA, 504 bp, Neisseria meningitidis
  CDS (1)..(504)
atgcccctactagacagtttcaaagtcgatcacacccgtatgcatgcccccgccgtacgcgtggcgaaaaccatgaccacgcccaaaggcgacaccattaccgtgttcgacctgcgcttttgcgttcccaataaagaaatcctgcctgaaaaaggcatacacacgctggagcatttgttcgcaggttttatgcgcgaccacttgaacggcaacggcgtggaaatcatcgacatttccccgatgggctgccgcaccggtttttatatgagccttatcggcacgccttccgaacagcaggtcgccgatgcgtggctggcttcgatgcaggatgttttgaatgtcaaagaccaaagcaaaatccccgagttgaacgaataccaatgcggcacttatcaaatgcactcgctcgccgaagcgcagcaaatcgcgcaaaacgtgttggcgcgcaaagtggcggtgaacaaaaatgaagagctgacgctggatgaagggctgctgaacgcc

SEQ ID NO: 42 - protein, 168 aa, Neisseria meningitidis
MPLLDSFKVDHTRMHAPAVRVAKTMTTPKGDTITVFDLRFCVPNKEILPEKGIHTLEHLFAGFMRDHLNGNGVEIIDISPMGCRTGFYMSLIGTPSEQQVADAWLASMQDVLNVKDQSKIPELNEYQCGTYQMHSLAEAQQIAQNVLARKVAVNKNEELTLDEGLLNA

SEQ ID NO: 43 - DNA, 813 bp, Neisseria meningitidis
  CDS (1)..(813)
atgactatgcacgccctcccccgctacgccgtttttggcaaccccgtcgcccacagcaaatcgccgcaaattcatcaacaatttgcccttcaggaaggcgttgacattgaatacgaacgcatttgcgccgacatcggcggtttcgcgcaggcggtttcgacattttttgaaacaggcggttgcggggcaaacgttaccgtaccgttcaagcaggaagcgtttcatctggcggacgagcattctgaacgcgcattggctgccggcgcggtcaacacgctgatttttctgaaaaacggaaaactgcgcggcgacaataccgacggtatcggtttggccaacgacatcacgcaggtcaaaaacattgccatcgaaggcaaaaccatcttgcttttgggcgcgggcggcgcggtgcgcggcgtgattcctgttttgaaagaacaccgtcctgcccgtatcgtcattgccaaccgtacccgcgccaaagccgaggaattggcgcagcttttcggcattgaagccgtcccgatggcggatgtgaacggcggttttgatatcatcatcaacggcacgtcgggcggtctaaacggtcagattcccgatattccgcccgatatttttcaaaactgcgcgcttgcctacgatatggtgtacggctgcgcggcaaaaccgtttttagattttgcacgacaatcgggtgcgaaaaaaactgccgacggactgggtatgctagtcggtcaagcggcggcttcctacgccctctggcgcggatttacgcccgatatccgccccgttatcgaatacatgaaagcccta

SEQ ID NO: 44 - protein, 271 aa, Neisseria meningitidis
MTMHALPRYAVFGNPVAHSKSPQIHQQFALQEGVDIEYERICADIGGFAQAVSTFFETGGCGANVTVPFKQEAFHLADEHSERALAAGAVNTLIFLKNGKLRGDNTDGIGLANDITQVKNIAIEGKTILLLGAGGAVRGVIPVLKEHRPARIVIANRTRAKAEELAQLFGIEAVPMADVNGGFDIIINGTSGGLNGQIPDIPPDIFQNCALAYDMVYGCAAKPFLDFARQSGAKKTADGLGMLVGQAAASYALWRGFTPDIRPVIEYMKAL

SEQ ID NO: 45 - DNA, 546 bp, Neisseria meningitidis
  CDS (1)..(546)
ttgctttctcatttggatatgaaattcgtcagcgaccttttgtctgtcatcttgttttttgctacttataccgttaccaaaaatatgattgccgctacggcggttgccttggttgccggtgtggttcaggcggcttttctgtattggaaatataaaaagctggatacgatgcagtgggtcggactggtgctgattgtcgtattcggcggcgcaaccattgttttgggcgacagccgcttcattatgtggaagccgagcgttttgttttggctgggcgcgctgttcctgtggggcagccacctcgccggtaaaaacggcttgaaggcgagtatcggcagggagattcagcttccggatgccgtatgggcgaaattgacgtatatgtgggtcggtttcctgatttttatgggtatcgccaactggtttgtgtttacccggttcgagtcgcaatgggtcaactataaaatgttcggctcgactgcactgatgcttgttttctttattattcagggtatttatctgagtacctgtctgaaaaaggaggat

SEQ ID NO: 46 - protein, 182 aa, Neisseria meningitidis
LLSHLDMKFVSDLLSVILFFATYTVTKNMIAATAVALVAGVVQAAFLYWKYKKLDTMQWVGLVLIVVFGGATIVLGDSRFIMWKPSVLFWLGALFLWGSHLAGKNGLKASIGREIQLPDAVWAKLTYMWVGFLIFMGIANWFVFTRFESQWVNYKMFGSTALMLVFFIIQGIYLSTCLKKED

SEQ ID NO: 47 - DNA, 585 bp, Neisseria meningitidis
  CDS (1)..(585)
ttgaatattaaactgaaaaccttgttattgcccttcgccacgctggcattgtgcaccaatgcttttgccgccccgcccagcgacgcgtcgttggcgcgttggctggatacgcagaattttgaccgggatatagaaaaaaatatgattgagggctttaatgccggatttaaaccgtatgcggacaaagcccttgccgaaatgccggaagcgaaaaaagatcaggcggcagaagcctttaaccgttatcgtgagaatgttttgaaagatttgattacgcccgaagtgaaacaggctgtccgcaatactttattgaagaatgcccgtgagatatacacgcaagaagaaattgacggcatgattgccttttacggttcgcctgtcggtcagtccgtcgttgccaaaaatccgcgcttaatcaagaaatcgatgagtgaaatagcggtatcttggactgcattgtcagggaaaatcgcgcaacatcatctgcccgagtttacggaagagttgcggcgcatcatctgcggcggtaaaaatcccgatgcgggctgtaaacaagccggacaggttgggaaaaggcatcagaaa

SEQ ID NO: 48 - protein, 195 aa, Neisseria meningitidis
LNIKLKTLLLPFATLALCTNAFAAPPSDASLARWLDTQNFDRDIEKNMIEGFNAGFKPYADKALAEMPEAKKDQAAEAFNRYRENVLKDLITPEVKQAVRNTLLKNAREIYTQEEIDGMIAFYGSPVGQSVVAKNPRLIKKSMSEIAVSWTALSGKIAQHHLPEFTEELRRIICGGKNPDAGCKQAGQVGKRHQK

SEQ ID NO: 49 - DNA, 462 bp, Neisseria meningitidis
  CDS (1)..(462)
ttgctttgcccggaaaaaatgtcggggatggcgggacagtatccgtacggcgtccggtcgggtttgcggaggaacggcttgaaactttgggatattcattttagaatgacccgttttatcgtcgcaagatgcggtttattgtttgcaacccttaaaggaaaaaccatgaagaaaatgttcgtgctgttctgtatgctgttctcctgcgccttctcccttgcggcggtaaacatcaatgcggcttcgcagcaggagctggaggcgctgccgggcataggccctgcgaaggcgaaggccattgcggaataccgtgcgcaaaacggtgcgttcaagtctgtagacgatttgaccaaggtaaagggcatcggccctgcggtgctggcgaagctgaaggatcaggcttctgtcggtgcgcccgcaccaaaaggcccagctaaaccagtgctgcccgcggataaaaaa

SEQ ID NO: 50 - protein, 154 aa, Neisseria meningitidis
LLCPEKMSGMAGQYPYGVRSGLRRNGLKLWDIHFRMTRFIVARCGLLFATLKGKTMKKMFVLFCMLFSCAFSLAAVNINAASQQELEALPGIGPAKAKAIAEYRAQNGAFKSVDDLTKVKGIGPAVLAKLKDQASVGAPAPKGPAKPVLPADKK

SEQ ID NO: 51 - DNA, 969 bp, Neisseria meningitidis
  CDS (1)..(969)
atgtccgccaagttccaacaagaaaccctcaaatcccgtttcgcgcaagccaaagtcctggttgtcggcgacgtgatgctcgaccgctattggttcggcgatgtgtcccgtatttcgcccgaagcccccgtgccggtggcgaaaatcggacgaatcgaccaacgcgcgggcggagcggcaaatgtcgcgcgcaacatcgcttcgctgggcggcaaagtagggctgttgtcggtaaccggtaacgacgaagccgccgacgcgctcgacgcgctgatggtgcaggacggcgtcgcctcctatctgatgcgcgacaaacaaatcgccaccaccgtcaaactgcgcgtcgtcgcccgcaaccagcagcttatccgccttgattttgaagaacatcccaaccgcgaagtgttggaacaaatcaagcggaaataccgcgaaatcttgcccgaatacgacgcaatcattttttcagactacggcaaaggcggcctgtcgcacatctccgatatgatcgattgggcgaaacacgaaggcaaaaccgtattaatcgaccccaaaggcgacgattacgaaaaatacgccggcgcaaccctgattacgcccaaccgcgccgaattgaaagaagtggtcggcagctggaaaaacgaaaatgatttgaccgaaaaagcccaaaacctgcgccgccacctcgacttgaccgctattttactgacccgaagcgaagaaggcatgaccttgttcagcgaaggcgaacccatttaccagcccacccgcgcccaagaagtttacgacgtatccggtgcgggcgacaccgtcattgccggaatgggcttgggtttggcggcaggctgcaccatgcccgaagccatgtaccttgccaatactgcggccggggttgtcgtggcgaaactcggtacggcggtttgctcgtttgccgaattgaccaaggcattgtcagggcaatcaacaatg

SEQ ID NO: 52 - protein, 323 aa, Neisseria meningitidis
MSAKFQQETLKSRFAQAKVLVVGDVMLDRYWFGDVSRISPEAPVPVAKIGRIDQRAGGAANVARNIASLGGKVGLLSVTGNDEAADALDALMVQDGVASYLMRDKQIATTVKLRVVARNQQLIRLDFEEHPNREVLEQIKRKYREILPEYDAIIFSDYGKGGLSHISDMIDWAKHEGKTVLIDPKGDDYEKYAGATLITPNRAELKEVVGSWKNENDLTEKAQNLRRHLDLTAILLTRSEEGMTLFSEGEPIYQPTRAQEVYDVSGAGDTVIAGMGLGLAAGCTMPEAMYLANTAAGVVVAKLGTAVCSFAELTKALSGQSTM

SEQ ID NO: 53 - DNA, 864 bp, Neisseria meningitidis
  CDS (1)..(864)
atgaaagcaaaaatcctgacttccgttgcactgcttgcctgttccggcagcctgtttgcccaaacgctggcaaccgtcaacggtcagaaaatcgacagttccgtcattgatgcgcaggttgccgcattccgtgcggaaaacagccgtgccgaagacacgccgcaactgcgccaatccctgctggaaaacgaagtggtcaacaccgtggtcgcacaggaagtgaaacgcctgaaactcgaccggtcggcagagtttaaaaatgcgcttgccaaattgcgtgccgaagcgaaaaagtcgggcgacgacaagaaaccgtccttcaaaaccgtttggcaggcggtaaaatatggcttgaacggcgaggcatacgcgctgcatatcgccaaaacccaaccggtttccgagcaggaagtaaaagccgcatatgacaatatcagcggtttttacaaaggtacgcaggaagtccagttgggcgaaatcctgaccgacaaggaagaaaatgcaaaaaaagcggttgccgacttgaaggcgaaaaaaggtttcgatgccgtcttgaaacaatattccctcaacgaccgtaccaaacagaccggtgcgccggtcggatatgtgccgctgaaagatttggaacagggtgttccgccgctttatcaggcaattaaggacttgaaaaaaggcgaatttacggcaacgccgctgaaaaacggcgatttctacggcgtttattatgtcaacgacagccgcgaggtaaaagtgccttcttttgatgaaatgaaaggacagattgcgggcaaccttcaggcggaacggattgaccgtgccgtcggtgcactgttgggcaaggcaaacatcaaacctgcaaaa

SEQ ID NO: 54 - protein, 288 aa, Neisseria meningitidis
MKAKILTSVALLACSGSLFAQTLATVNGQKIDSSVIDAQVAAFRAENSRAEDTPQLRQSLLENEVVNTVVAQEVKRLKLDRSAEFKNALAKLRAEAKKSGDDKKPSFKTVWQAVKYGLNGEAYALHIAKTQPVSEQEVKAAYDNISGFYKGTQEVQLGEILTDKEENAKKAVADLKAKKGFDAVLKQYSLNDRTKQTGAPVGYVPLKDLEQGVPPLYQAIKDLKKGEFTATPLKNGDFYGVYYVNDSREVKVPSFDEMKGQIAGNLQAERIDRAVGALLGKANIKPAK

SEQ ID NO: 55 - DNA, 1257 bp, Neisseria meningitidis
  CDS (1)..(1257)
atgaaacagaccgtcctcaaaaataacctgcaaaacctgcttgaaagcgcagaaaatatcctgctgcttcaaggccctgtcggcgatttttttctgcgccttgccgactggctgactgcaaacggcaaaaccgtacataaattcaactttaatgcaggcgacgactatttttatccgcccactcaagcgcataccgttgtttttaacgacaactacgatgcctttcctgagtttttgcaagaatacatcactcaacatcacatccaggccgttgtctgctttggcgacacacgcccttatcacgtcattgcaaaacgcattgcaaacgaaaaccaagccagtttctgggcgtttgaagaaggctatttccgcccctactacatcaccttagaaaaagacggcgtcaacgcattttccccgttgccgcgccgtgccgacttttttcttgaacaattccctaagcttgcccagcaagaatataaagcgccaacgccggtacacggcggttttacgcccatggcaaaaaacgctatccgttactatatcgagttgttccgcaatctacgcaaataccccgactacatccaccaccgcgcacccaatgccggccattacctcaaaccgtggtcgctctccatcctcaagcgtttgaactactatattgaagacatccaaatcgccaaacgtgtggaagcaggcaaatacggcaagttttttattgttcccttgcaggtattcaacgacagccaagtccgtatccattgcgactttcccagcgtccgcagcttcctgctccatgttttgagttcatttgccgaacacgcgcctgccgataccaacatcatcatcaagcatcatcctatggaccgcggctttatcgactactggcgcgacattaaacgctttatcaaagaacaccccgaactcaaaggccgtgtgatttatgtccatgatgtccccctgcccgttttcctgcgccacggtctcggcatggttaccatcaacagcaccagcggcctgtccggactgattcacaatatgccagttaaggttctcggccgtgcctattatgatattcccggcattactgaccaaaataccttggcagaattttggaatcatccgacaccgcctgacaaagagctgttccatgcctaccgaatgtaccacctcaacgtgacccaaattaacggcaacttctacagtcaggtcttttttcctaacaaaaacacatccgactcttccacaccaacaacc

SEQ ID NO: 56 - protein, 419 aa, Neisseria meningitidis
MKQTVLKNNLQNLLESAENILLLQGPVGDFFLRLADWLTANGKTVHKFNFNAGDDYFYPPTQAHTVVFNDNYDAFPEFLQEYITQHHIQAVVCFGDTRPYHVIAKRIANENQASFWAFEEGYFRPYYITLEKDGVNAFSPLPRRADFFLEQFPKLAQQEYKAPTPVHGGFTPMAKNAIRYYIELFRNLRKYPDYIHHRAPNAGHYLKPWSLSILKRLNYYIEDIQIAKRVEAGKYGKFFIVPLQVFNDSQVRIHCDFPSVRSFLLHVLSSFAEHAPADTNIIIKHHPMDRGFIDYWRDIKRFIKEHPELKGRVIYVHDVPLPVFLRHGLGMVTINSTSGLSGLIHNMPVKVLGRAYYDIPGITDQNTLAEFWNHPTPPDKELFHAYRMYHLNVTQINGNFYSQVFFPNKNTSDSSTPTT

SEQ ID NO: 57 - DNA, 1407 bp, Neisseria meningitidis
  CDS (1)..(1407)
atgacctccacattcccccgccgcctcgcccgcaaaatccgccaaacccgccgcctgtcgcgcaaaagcatcgcctttctgttccttttggcaggttcggcactcgtcgccctgaccgcgctgttttttgcccatcttgccgattttgcgctggaactgaacgccaaactggttcaacaatacccgtggttcgcgtgggtcgcgcttcctttgggtttaccgcttattgcgtggctcacacgcaaattcgcccccttcaccgccggcagcggcatcccgcaggtcatcgcctcactgtcgctgccctacggcgcacagaaaacgcggctgatccgcctcgggcagacgctgctgaagattccgctaacctttttgggtatgctgttcggcgcgtccatcggacgcgaaggtccgtccgtgcaggtcggcgcggcagtgatgggcgcgtggggcgcgtggtgcaagaaacacggcttggcattcaaagggatgcaggaaaacgatttgatggcggcgggcgcggcgggcggtttggcagccgcgttcaacgcgccgctggcgggcgtgattttcgccattgaggaactcgggcgcggcatcatgttgcgctgggagaggcaaattcttttgggcgtgctcgcctccggtttcatacaggtcgccattcagggcaacaacccgtatttttccggcttcaacggcggcgtattggaacatatctttctgtgggtcgcactgtccggcctggtttgcggcgcggcgggcgggctgttcggacgtttgctctatcgcggtgcggcggcgtttgcaccgcgcaagatacgcggcttcatccgcaaccgtccgctgctgctggcggcactgatggggctgctgctcgccctgctcggcacgttctaccaaggcaaaacctacggcaccggctaccacgaagccgcccaagccctgcacggcatctacgaagcccccttcggactcgccgccgccaaatggctcgccaccgtattcagctattgggcaggcgttccgggcggcattttcactccctcgctgaccataggcgcggttttgggcgagcatatcgccgccatcgccgacatatcgcagggtgcaaacatcatcgtcctcatctgcatggcggcatttctggcgggcgcgacacaatccccgattacttccgccgtcgtcgtcatggaaatgacgggcggacaaagcctgctgttttggatgctgattgcctgcattttcgcctcgcaggtttcgcgccagttttcgccgcgtccgttctaccacgcatcgggaatgcgcttccgccagcgcgtgcttcaagaaaccgccgcccaaaccggcaatgcgcccgcaagaccgcaaacagcaaacagcaaaacgggaatgccgtctgaaaat

SEQ ID NO: 58 - protein, 469 aa, Neisseria meningitidis
MTSTFPRRLARKIRQTRRLSRKSIAFLFLLAGSALVALTALFFAHLADFALELNAKLVQQYPWFAWVALPLGLPLIAWLTRKFAPFTAGSGIPQVIASLSLPYGAQKTRLIRLGQTLLKIPLTFLGMLFGASIGREGPSVQVGAAVMGAWGAWCKKHGLAFKGMQENDLMAAGAAGGLAAAFNAPLAGVIFAIEELGRGIMLRWERQILLGVLASGFIQVAIQGNNPYFSGFNGGVLEHIFLWVALSGLVCGAAGGLFGRLLYRGAAAFAPRKIRGFIRNRPLLLAALMGLLLALLGTFYQGKTYGTGYHEAAQALHGIYEAPFGLAAAKWLATVFSYWAGVPGGIFTPSLTIGAVLGEHIAAIADISQGANIIVLICMAAFLAGATQSPITSAVVVMEMTGGQSLLFWMLIACIFASQVSRQFSPRPFYHASGMRFRQRVLQETAAQTGNAPARPQTANSKTGMPSEN

SEQ ID NO: 59 - DNA, 423 bp, Neisseria meningitidis
  CDS (1)..(423)
atgacacaagaaaccgctttgggcgcagcactgaaatccgccgtccaaactatgagcaaaaagaaacagacagaaatgattgccgaccacatctacggcaaatatgatgtattcaaacgatttaaaccgttggcactcggtatcgatcaggatttgattgccgctttgccccaatacgatgccgcactgattgcacgcgtcctcgccaaccactgccgccgtccgcgctatctgaaagccttggcgcgcggtggcaaacgtttcgatttgaacaaccgtttcaaaggcgaagttacccccgaagaacaggcaatcgcgcaaaaccatcctttcgtgcagcaggctttgcaacagcagtccgcccaagctgtcgccgaaacgccgtctgttgaagccgaagcagccgaatcttccacaacagaa

SEQ ID NO: 60 - protein, 141 aa, Neisseria meningitidis
MTQETALGAALKSAVQTMSKKKQTEMIADHIYGKYDVFKRFKPLALGIDQDLIAALPQYDAALIARVLANHCRRPRYLKALARGGKRFDLNNRFKGEVTPEEQAIAQNHPFVQQALQQQSAQAVAETPSVEAEAAESSTTE

SEQ ID NO: 61 - DNA, 1377 bp, Neisseria meningitidis
  CDS (1)..(1377)
atgttcgctttcaaatccttactcgatatgccgcgcggtgaggcacttgccgtcgtcgtcgctctgattgccgcgatgggctataccatcatttcattggagtggctgccgcatatgtccattattgccgccatcgtcgtgctgattttgtacggcttggcgcgcggtttgaaatacaacgatatgcagcagggcatgataggcgcgttgaatcagggtatgggcgcgatttacctgtttttcttcatcgggctgatggtcagcgcgctgatgatgagcggcgcgattccgacgctgatgtattacggtttcggactgatttccccgacttatttttatttttccgccttcgcgctgtgttccgtcatcggcgtgtccatcggcagcagcctgaccacctgcgccactgtcggcgttgcctttatgggtatggcggcggcgtttcaggccgatatggcgatgacggcgggcgcgattgtttcgggcgcattttttggcgacaaaatgtccccgctttccgatacgacgggcatttccgcgtccattgtcggtatcgacctgtttgaacacatcaaaaatatgatgtacaccaccattcccgcgtggctcatcagtgcggcactgatgctgtggcttcttcccagcgtcgccgcgcaggatttgaacagcgtcgaatccttccgcagccagcttgaagccacgggattggtgcactgctattcgctgattccgtttgcgctgttggtcgttttggcattgatgcgcgtcaatgccgtggtcgctatgctctttaccgtcattgccgccgttgccgtaacgtatctgcacagcacgcccgatctgcgtcagctcggcgcgtggttttacggcggctacaaactcgaaggcgaagcgtttaaagacattgccaaactcatttctcgcggcggtttggaaagtatgtttttcacgcagaccatcgtgattcttgggatgagccttggcgggctgctgtttgcactgggcgcgattccttccctgctggatgccgtccgcagctttttgacgaatgccgggcgtgccacattcagcgttgccatgacttcggtcggggttaatttcctgatcggcgagcaatatttgagtattttgttgtcgggtgaaacgttcaaacctgtttacgataagctcggtctgcattcgcgcaatctgtcgcggacgctggaagatgcggggacggtcatcaacccgctcgtaccgtggagcgtatgcggcgtgttcatcagccacgcgctgggcgtgccggtttgggaatatctgccgtatgcctttttctgctatttgagtttggctttgaccctgttattcggttggacggggctgactttgagcaaaaaa

SEQ ID NO: 62 - protein, 459 aa, Neisseria meningitidis
MFAFKSLLDMPRGEALAVVVALIAAMGYTIISLEWLPHMSIIAAIVVLILYGLARGLKYNDMQQGMIGALNQGMGAIYLFFFIGLMVSALMMSGAIPTLMYYGFGLISPTYFYFSAFALCSVIGVSIGSSLTTCATVGVAFMGMAAAFQADMAMTAGAIVSGAFFGDKMSPLSDTTGISASIVGIDLFEHIKNMMYTTIPAWLISAALMLWLLPSVAAQDLNSVESFRSQLEATGLVHCYSLIPFALLVVLALMRVNAVVAMLFTVIAAVAVTYLHSTPDLRQLGAWFYGGYKLEGEAFKDIAKLISRGGLESMFFTQTIVILGMSLGGLLFALGAIPSLLDAVRSFLTNAGRATFSVAMTSVGVNFLIGEQYLSILLSGETFKPVYDKLGLHSRNLSRTLEDAGTVINPLVPWSVCGVFISHALGVPVWEYLPYAFFCYLSLALTLLFGWTGLTLSKK

SEQ ID NO: 63 - DNA, 1098 bp, Neisseria meningitidis
  CDS (1)..(1098)
atggcaggcaacactttcggacaactcttcaccgttaccaccttcggcgaaagccacggcgcgggtttgggctgtatcatcgacggctgcccgcccggcttggaattaagcgaagcggatatccaatttgacctcgaccgacgcaaacccggcaccagccgccacgttacccaacgccgcgaagccgaccaagtcgaaatcctctccggcgtattcgaaggcaaaaccaccggcacgcccatcgccctcttaatccgcaataccgaccagcgcagcaaagactacggcaacatcgccaccagcttccgccccggccacgccgactatacctattggcacaaatacggcacgcgcgactaccggggcggcggcaggagttccgcccgcgaaaccgccgcccgcgttgccgccggagccgttgccaaaaaatggttgaaagaaaaattcggcacggaaatcaccgcctacgttacccaagtcggcgaaaaagaaatccggtttgaaggctgcgaacacatttcccaaaatcctttttttgccgccaaccatagccaaattgccgagctggaaaactatatggacagcgtgcgcaaatccttggattccgtcggcgcgaagctgcatattgaagccgccaacgtccccgtcggcttgggcgaacccgtattcgaccgcctcgatgccgaaatcgcctacgccatgatgggcatcaacgccgtcaaaggcgtggaaatcggcgcaggttttgacagcgtaacgcaacgcggcagcgaacacggcgacgaactcaccccgcaaggcttcctgtccaaccactcaggcggcatcctcggcggcatcagcaccggacaagacatccacgtcaatatcgccatcaaacccaccagctccatcgccaccccgcgccgcagtatcgacatcaacggcaaccccatcgaactcgccacgcacggcaggcacgacccctgcgtcggcttgcgcgccgcgccgattgcagaagctatgctggcattggttttaatcgaccacgccctgcgccatcgcgcgcaaaatgcggatgttcaggttaatacgcccgacattaccctttcaaacaaa

SEQ ID NO: 64 - protein, 366 aa, Neisseria meningitidis
MAGNTFGQLFTVTTFGESHGAGLGCIIDGCPPGLELSEADIQFDLDRRKPGTSRHVTQRREADQVEILSGVFEGKTTGTPIALLIRNTDQRSKDYGNIATSFRPGHADYTYWHKYGTRDYRGGGRSSARETAARVAAGAVAKKWLKEKFGTEITAYVTQVGEKEIRFEGCEHISQNPFFAANHSQIAELENYMDSVRKSLDSVGAKLHIEAANVPVGLGEPVFDRLDAEIAYAMMGINAVKGVEIGAGFDSVTQRGSEHGDELTPQGFLSNHSGGILGGISTGQDIHVNIAIKPTSSIATPRRSIDINGNPIELATHGRHDPCVGLRAAPIAEAMLALVLIDHALRHRAQNADVQVNTPDITLSNK

SEQ ID NO: 65 - DNA, 461 bp, Neisseria meningitidis
  CDS (1)..(459)
atgcaaagcggttttaacgctattttcaggaatgacaccatgcaggttacatcaaaatggatagacggaatgtgctttgtcggaacaacggaaggcgggcacagcgtcgttatggaggggtcggcggcagaaggtgcggccaagcgcgggcccagccctttggaaatgctgctgttgggcgtggcgggctgttcgagcatcgatgtggtgatgattgccgaaaaacagcgtcagaaagtgactgactgccgtgcgacggttacggcgaaacgggcggacgatgcgccgcgcgtgtttaccgaaatccacatccatttcaaagtattcgggcatgatttgaaagaatcggccattgagcgcgccgttcagatgtctgccgaaaaatactgttcggcttcgattatgttgggcaaagcggcaaagattacccacagttttgaaattgccggggcagataaata

SEQ ID NO: 66 - protein, 153 aa, Neisseria meningitidis
MQSGFNAIFRNDTMQVTSKWIDGMCFVGTTEGGHSVVMEGSAAEGAAKRGPSPLEMLLLGVAGCSSIDVVMIAEKQRQKVTDCRATVTAKRADDAPRVFTEIHIHFKVFGHDLKESAIERAVQMSAEKYCSASIMLGKAAKITHSFEIAGADK

SEQ ID NO: 67 - DNA, 1659 bp, Neisseria meningitidis
  CDS (1)..(1659)
atgactgacaacagccctcctccaaacggacacgcccaagcacgcgtccgcaaaaacaacaccttcctctctgccgtctggctggttccgctgatcgcgctgattgccggcggctggctttgggttaaggaaatccgcaacagggggcctgtggttacgctcttgatggacagcgcggaaggcattgaggtcaacaatacggtcatcaaagtattgagcatcgatgtcggacgcgttacccgaatcaaactgcgcgacgaccaaaaaggcgtggaagtaaccgcccaactcaatgcggacgtatccggcctcatccgcagcgatacccagttttgggtggtcaagccgcgtatcgaccaaagcggcgtaaccggtttgggtacgctgctttcgggttcgtacatcgcctttacacccggcaaaagcgacgaggcaaaagacgtgttccaagtgcaggacattccgcccgttaccgccatcgggcaaagcgggctgcgcttgaatttgattggtaaaaacgaccgcatcctcaacgtcaacagccctgttttgtatgaaaactttatggtcgggcaagtcgaaagcgcgcatttcgacccgtccgaccaaagcgtgcattacaccatcttcatccaaagccccaacgacaaactgattcattccgccagccgtttctggctggaaagcggcatcaatatcgaaaccacaggcagcggcatcaaactcaattccgcccctctgcctgccctgctgtcgggcgcgatttcatttgattcgccgaaaaccaaaaacagtaaaaacgtcaaaagcgaagacagcttcacgctttacgacagccgcagcgaagtcgccaacctgcctgatgaccgttcgctgtactacaccgcgtttttcaaacaatccgtgcgcggactgaccgtcggttcgcctgtcgagtacaaagggctgaatgtcggcgtggtttccgatgttccttatttcgaccgcaacgacagcctgcacctgtttgaaaacggctggattcccgtacgcatccgtattgagccttcccgtttggaaatcaatgccgacgaacaaagcaaagaacattggaaacaacaatttcagacggccttaaacaaaggcctgaccgccaccatctccagcaacaacctgctgaccggcagcaaaatgattgagttgaacgatcagccttccgcctcgcccaagctgcgaccgcataccgtttatgcaggcgataccgttatcgcgacccagggcggcggtttggacgatttgcaggtcaaattggcggatttgctggacaagttcgacaaactgcctttagataagacggttgccgaattgaacggttcgcttgccgagctcaaatccacactcaaatctgccaatgccgccctaagctccatcgacaaactggtcggcaaaccgcagacacaaaacattccgaacgaactgaaccaaaccctgaaagagttgcgcacaaccctgcaaggcgtatcgcctcaatcgcctatctacggcgacgtacaaaatacgctgcaaagtttggacaaaaccttaaaagacgttcaacccgtcattaacactttgaaagaaaaacccaacgcgctgattttcaacagcagcagcaaagaccctatcccgaaaggaagccga

SEQ ID NO: 68 - protein, 553 aa, Neisseria meningitidis
MTDNSPPPNGHAQARVRKNNTFLSAVWLVPLIALIAGGWLWVKEIRNRGPVVTLLMDSAEGIEVNNTVIKVLSIDVGRVTRIKLRDDQKGVEVTAQLNADVSGLIRSDTQFWVVKPRIDQSGVTGLGTLLSGSYIAFTPGKSDEAKDVFQVQDIPPVTAIGQSGLRLNLIGKNDRILNVNSPVLYENFMVGQVESAHFDPSDQSVHYTIFIQSPNDKLIHSASRFWLESGINIETTGSGIKLNSAPLPALLSGAISFDSPKTKNSKNVKSEDSFTLYDSRSEVANLPDDRSLYYTAFFKQSVRGLTVGSPVEYKGLNVGVVSDVPYFDRNDSLHLFENGWIPVRIRIEPSRLEINADEQSKEHWKQQFQTALNKGLTATISSNNLLTGSKMIELNDQPSASPKLRPHTVYAGDTVIATQGGGLDDLQVKLADLLDKFDKLPLDKTVAELNGSLAELKSTLKSANAALSSIDKLVGKPQTQNIPNELNQTLKELRTTLQGVSPQSPIYGDVQNTLQSLDKTLKDVQPVINTLKEKPNALIFNSSSKDPIPKGSR

SEQ ID NO: 69 - DNA, 330 bp, Neisseria meningitidis; identical to SEQ ID NO: 33
  CDS (1)..(330)

SEQ ID NO: 70 - protein, 110 aa, Neisseria meningitidis; identical to SEQ ID NO: 34

SEQ ID NO: 71 - DNA, 2274 bp, Neisseria meningitidis
  CDS (1)..(2274)
atgacaacattacatttctcaggcttcccgcgtgtcggtgccttccgcgaattgaaattcgcacaagaaaaatactggcgcaaagaaatcagcgagcaagaattgctggctgttgctaaagacttgcgcgagaaaaactggaaacaccaggccgctgccaacgccgattacgttgccgtaggcgatttcactttctacgaccacatcctcgacctgcaagtcgccaccggcgcgattcccgcccgcttcggcttcgacagccaaaacctatctttggaacaattcttccaactggcgcgcggtaacaaagaccaattcgctatcgaaatgaccaaatggttcgacaccaactaccactacttggtgcctgaattccacgccgataccgaatttaaagccaatgccaaacactacgttcaacagctgcaagaagcccaagctttgggcctgaaagccaaaccgaccgttgtgggtccgttgactttcctgtgggtcggtaaagaaaaaggcgccgttgaattcgaccgtctgagcctgttgcctaaactgttgcctgtttacgttgaaatcctgactgctttggttgaagccggtgccgagtggattcaaatcgacgagcctgctttgactgttgacctgcctaaagaatgggtagaagcatacaaagacgtttacgccactttgagcaaagtaagtgccaaaatcctgctgagcacttacttcggttctgttgccgaacacgccgcattgttgaaatccctgcctgttgacggcctgcacatcgacttggtacgcgctcctgaacaactggatgcgttcgccgactacgacaaagttctgtctgccggcgtcattgacggccgcaatatttggcgcgccaacctgaacaaagttttggaaactgttgagcttctgcaagccaaactgggcgaccgtttgtggatttccagctcttgctcgctgctgcacactccgtttgacttgtcagttgaagaaaaactgaaagccaacaaacccgacctgtactcttggttggcattcaccctgcaaaaaacccaagaattgcgcgtcctgaaagccgcattgaacgaaggccgtgattctgttgccgaagaactggctgccagccaagctgctgccgactcccgtgccaacagcagcgaaatccaccgtgcagacgttgccaaacgcctggccgatttgcctgccaacgcagaccaacgcaaatccccatttgccgaccgtatcaaagcgcaacaagcatggttgaacctgcctctgctgccgacgaccaacatcggttctttcccgcaaactaccgaaatccgccaagcacgcgcagccttcaaaaaaggcgaactgtctgccgccgattacgaagccgcgatgaaaaaagaaatcgccttggtggttgaagagcaagaaaaactggacttggacgtactggtacacggcgaagccgagcgtaacgacatggttgaatacttcggcgaattgttgagcggttttgcattcacccaatatggctgggtacaaagctacggttctcgctgcgttaaaccaccgattatcttcggtgacgtaagccgtcctgaagccatgaccgtagcttggtctacttacgcacaaagcctgaccaaacgcccgatgaaaggtatgttgaccggccctgtaaccattctgcaatggtctttcgtccgcaacgatattcctcgctctaccgtgtgtaaacaaatcgcactggctctgaacgacgaagtattggatctggaaaaagcaggcatcaaagtcatccaaatcgacgaacctgccatccgcgaaggcctgcctttgaaacgtgccgattgggatgcctacctgaactgggccggcgaatctttccgcctgtcctctaccggttgcgaagacagcactcaaatccacacccatatgtgctactctgagttcaacgacatcctgcctgcgattgctgcaatggatgcggacgtgatcaccatcgagacttcacgttccgacatggaactcttgaccgcgttcggcgaattcaaatacccgaacgacatcggcccgggggtttacgacatccacagcccgcgcgtaccgacagaagccgaagtggagcacctgttgcgcaaagccatcgaggttgtaccggttgaacgtctgtgggttaacccggactgcggcctgaaaacacgcggctggaaagaaactctggaacaactccaagtgatgatgaacgtaacccacaaattgcgtgccgaattggcgaaa

SEQ ID NO: 72 - protein, 758 aa, Neisseria meningitidis
MTTLHFSGFPRVGAFRELKFAQEKYWRKEISEQELLAVAKDLREKNWKHQAAANADYVAVGDFTFYDHILDLQVATGAIPARFGFDSQNLSLEQFFQLARGNKDQFAIEMTKWFDTNYHYLVPEFHADTEFKANAKHYVQQLQEAQALGLKAKPTVVGPLTFLWVGKEKGAVEFDRLSLLPKLLPVYVEILTALVEAGAEWIQIDEPALTVDLPKEWVEAYKDVYATLSKVSAKILLSTYFGSVAEHAALLKSLPVDGLHIDLVRAPEQLDAFADYDKVLSAGVIDGRNIWRANLNKVLETVELLQAKLGDRLWISSSCSLLHTPFDLSVEEKLKANKPDLYSWLAFTLQKTQELRVLKAALNEGRDSVAEELAASQAAADSRANSSEIHRADVAKRLADLPANADQRKSPFADRIKAQQAWLNLPLLPTTNIGSFPQTTEIRQARAAFKKGELSAADYEAAMKKEIALVVEEQEKLDLDVLVHGEAERNDMVEYFGELLSGFAFTQYGWVQSYGSRCVKPPIIFGDVSRPEAMTVAWSTYAQSLTKRPMKGMLTGPVTILQWSFVRNDIPRSTVCKQIALALNDEVLDLEKAGIKVIQIDEPAIREGLPLKRADWDAYLNWAGESFRLSSTGCEDSTQIHTHMCYSEFNDILPAIAAMDADVITIETSRSDMELLTAFGEFKYPNDIGPGVYDIHSPRVPTEAEVEHLLRKAIEVVPVERLWVNPDCGLKTRGWKETLEQLQVMMNVTHKLRAELAK

SEQ ID NO: 73 - DNA, 2118 bp, Neisseria meningitidis
  CDS (1)..(2118)
atgcgccgttttctaccgatcgcagccatatgcgccgtcgtcctgttgtacggactgacggcggcaaccggcagcaccagttcgctggcggattatttctggtggattgttgcgttcagcgcaatgctgctgctggtgttgtccgccgttttggcacgttatgtcatattgctgttgaaagacaggcgcgacggcgtattcggttcgcagattgccaaacgcctttccgggatgtttacgctggttgccgtactgcccggcgtgtttctgttcggcgtttccgcacagtttatcaacggcacgattaattcgtggttcggcaacgatacccacgaggcgcttgaacgcagcctcaatttgagcaagtccgcattgaatctggcggcagacaacgcccttggcaacgccatccccgtgcagatagacctcatcggcgcggcttccctgcccggggatatgggcagggtgctggaacattacgccggcagcggttttgcccagcttgccctgtacaatgccgcaagcggcaaaatcgaaaaaagcatcaacccgcacaagctcgatcagccgtttccaggtaaggcgcgttgggaaaaaatccaacaggcgggttcggtcagggatttggaaagcataggcggcgtattgtacgcgcagggctggctgtcggcaggtacgcacaacgggcgcgattacgccttgtttttccgtcagccggttcccaaaggcgtggcagaggatgccgtcttaatcgaaaaggcaagggcgaaatatgctgagttgagttacagcaaaaaaggtttgcagacctttttcctggcaaccctgctgattgcctcgctgctgtcgatttttcttgcactggtcatggcactgtatttcgcccgccgtttcgtcgaacccgtcctatcgcttgccgagggggcgaaggcggtggcgcaaggcgatttcagccagacgcgccccgtgttgcgcaacgacgagttcggacgcttgaccaagttgttcaaccacatgaccgagcagctttccatcgccaaagaagcagacgagcgcaaccgccggcgcgaggaagccgccagacattatctcgaatgcgtgttggaggggctgaccacgggcgtggtggtgtttgacgaacaaggctgtctgaaaaccttcaacaaagcggcggaacagattttggggatgccgcttacccccctgtggggcagcagccggcacggttggcacggcgtttcggcgcagcagtccctgcttgccgaagtgtttgccgccatcggcgcggcggcaggtacggacaaaccggtccatgtgaaatatgccgcgccggacgatgccaaaatcctgctgggcaaggcaaccgtcctgcccgaagacaacggcaacggcgtggtaatggtgattgacgacatcaccgttttgatacacgcgcaaaaagaagccgcgtggggcgaagtggcaaaacggctggcacacgaaatccgcaatccgctcacgcccatccagctttctgccgaacggctggcgtggaaattgggcgggaagctggacgagcaggacgcgcaaatcctgacacgttcgaccgacaccatcatcaaacaagtggcggcattaaaagaaatggtcgaggcattccgcaattacgcgcgttccccttcgctcaaattggaaaatcaggatttgaacgccttaatcggcgatgtgttggcattgtacgaagctggtccgtgccggtttgcggcggaacttgccggcgaaccgctgatgatggcggcggatacgaccgccatgcggcaggtgctgcacaatattttcaaaaatgccgccgaagcggcggaagaagccgatgtgcccgaagtcagggtaaaatcggaagcggggcaggacggacggattgtcctgacagtttgcgacaacggcaaggggttcggcagggaaatgctgcacaatgccttcgagccgtatgtaacggacaaaccggctggaacgggattgggactgcccgtggtgaaaaaaatcattgaagaacacggcggccgcatcagcctgagcaatcaggatgcgggcggcgcgtgtgtcagaatcatcttgccaaaaacggtagaaacttatgcg

SEQ ID NO: 74 - protein, 706 aa, Neisseria meningitidis
MRRFLPIAAICAVVLLYGLTAATGSTSSLADYFWWIVAFSAMLLLVLSAVLARYVILLLKDRRDGVFGSQIAKRLSGMFTLVAVLPGVFLFGVSAQFINGTINSWFGNDTHEALERSLNLSKSALNLAADNALGNAIPVQIDLIGAASLPGDMGRVLEHYAGSGFAQLALYNAASGKIEKSINPHKLDQPFPGKARWEKIQQAGSVRDLESIGGVLYAQGWLSAGTHNGRDYALFFRQPVPKGVAEDAVLIEKARAKYAELSYSKKGLQTFFLATLLIASLLSIFLALVMALYFARRFVEPVLSLAEGAKAVAQGDFSQTRPVLRNDEFGRLTKLFNHMTEQLSIAKEADERNRRREEAARHYLECVLEGLTTGVVVFDEQGCLKTFNKAAEQILGMPLTPLWGSSRHGWHGVSAQQSLLAEVFAAIGAAAGTDKPVHVKYAAPDDAKILLGKATVLPEDNGNGVVMVIDDITVLIHAQKEAAWGEVAKRLAHEIRNPLTPIQLSAERLAWKLGGKLDEQDAQILTRSTDTIIKQVAALKEMVEAFRNYARSPSLKLENQDLNALIGDVLALYEAGPCRFAAELAGEPLMMAADTTAMRQVLHNIFKNAAEAAEEADVPEVRVKSEAGQDGRIVLTVCDNGKGFGREMLHNAFEPYVTDKPAGTGLGLPVVKKIIEEHGGRISLSNQDAGGACVRIILPKTVETYA

SEQ ID NO: 75 - DNA, 1686 bp, Neisseria meningitidis; identical to SEQ ID NO: 7
  CDS (1)..(1686)

SEQ ID NO: 76 - protein, 562 aa, Neisseria meningitidis; identical to SEQ ID NO: 8

SEQ ID NO: 77 - DNA, 1773 bp, Neisseria meningitidis
  CDS (1)..(1773)
atgagtatcgtgctgcacggcgtggcggcgggcaaaggcattgccgtcggttgcgcccacctgattgcgcgcggtacggaggaagtgccgcagtatgatgttgcggaggcggacaccgatgccgaagccgaacgtttcgatgccgccgtcaaagccacgcgcaaagagttggaacagctccgcagcgcgattcccgaaaacgccccgaccgagttgggcgcgttcatctcgctgcacctgatgctcttgaccgatgttaccttgtcgcgcgaacccgtcgatattttaagggaacaaaaaatcaacgccgagtgggcattgaagcagcagagcgacaaactcgccgcccaattcgacaatatggacgatgcctatttgcgcgaacgcaagcaggatatgctgcaagtcgtccgccgcatccacaacaacctgatcgggcagggcaacgagttggaagttgccgacaacctgtttgacgaaaccgttctgattgcaaacgacctttcgcccgccgacacggttttgtttaaagagcagcgcattgccgccttcgttaccgatgccggcggccccaccgggcatacggcgattttgggcaggagcttggacatcccgtccgtcgtcgggctgcacaacgcgcgcaaactgattaccgagggcgaaacggtcattgtggacggtatcaacggcgtgttgattatcgcgccggatgagtcggtgttgaacgaataccgccgccgtgcccgcgaataccgcagccacaaacgcgatttgaacaagctcaaaaaaaccgccgccgccaccgctgacggggtctgcatcgagcttgtgggcaatatagaatccgccgaagacgtgaaaccgctgcacaacctcggcgcagacggcatcgggctgttccgcagcgagtttctttacctgaaccgcgatacgatgccgtctgaagacgagcagtacgaagtgtacagcgcgattgtcaaaaaaatgaaaggcaaaagcgtaacgatacggacagtcgatttgggtgtggacaaaaacccgcgctggttcgggaaaaacagcacgcccaacggcagcctcaaccccgcgctgggcatgaccggcatccgcctgtgccttgccgaaccggtcatgttccgcacccagatgcgcgccatcctccgcgccgccgcccacggccccgtgcggatgatgtggccgatgattacctccgtatccgaagtgcgccagtgcctcatccacctcgacaccgcgcaacgccagcttgccgaacgcggcgatgccttcggtaaagtcggcatcggctgtatgattgaaattccgtctgccgcgctgaccgtcggcagtattttgaaactggtcgatttcatctccgtcggtaccaacgacctgattcaatacatcttgtccgtcgatcgcggcgacgacagcgtcagccacctctaccagcccggccatcccgccgtgctgaaaatgctgcaacacgtcatccgtaccgccaaccgcatggacaaagacgtatccgtatgcggcgagatggcgggcgataccgcgtttacccgcgttttattgggtatggggctgcgccgtttttccatgaaccccaacaacatcctgcccgtcaaaaacatcattctgcacagcaatgtcggacagctcgaaagcgatattgtgaaagtcatccgctgcgaagacgaagagaagtcggaaaagctgatcaaacagatgaacagcgtgtctgtcgaggaagaagccgacttcaaggggcggaaa

SEQ ID NO: 78 - protein, 591 aa, Neisseria meningitidis
MSIVLHGVAAGKGIAVGCAHLIARGTEEVPQYDVAEADTDAEAERFDAAVKATRKELEQLRSAIPENAPTELGAFISLHLMLLTDVTLSREPVDILREQKINAEWALKQQSDKLAAQFDNMDDAYLRERKQDMLQVVRRIHNNLIGQGNELEVADNLFDETVLIANDLSPADTVLFKEQRIAAFVTDAGGPTGHTAILGRSLDIPSVVGLHNARKLITEGETVIVDGINGVLIIAPDESVLNEYRRRAREYRSHKRDLNKLKKTAAATADGVCIELVGNIESAEDVKPLHNLGADGIGLFRSEFLYLNRDTMPSEDEQYEVYSAIVKKMKGKSVTIRTVDLGVDKNPRWFGKNSTPNGSLNPALGMTGIRLCLAEPVMFRTQMRAILRAAAHGPVRMMWPMITSVSEVRQCLIHLDTAQRQLAERGDAFGKVGIGCMIEIPSAALTVGSILKLVDFISVGTNDLIQYILSVDRGDDSVSHLYQPGHPAVLKMLQHVIRTANRMDKDVSVCGEMAGDTAFTRVLLGMGLRRFSMNPNNILPVKNIILHSNVGQLESDIVKVIRCEDEEKSEKLIKQMNSVSVEEEADFKGRK

SEQ ID NO: 79 - DNA, 1062 bp, Neisseria meningitidis
  CDS (1)..(1062)
atggaaaaagaattcaggatattaaatatcgtatcggccaagatttggggtggaggcgaacaatatgtctatgatgtttcaaaagcattggggcttcgggactgcacaatgtttaccgccgtcaataaaaataatgaattgatgcacaggcgattttccgaagtttcttccgttttcacgacacgccttcacacgctcaacgggctgttttcgctctacgcacttacccgctttatccggaaaaaccgcatttcccacctgatgatacacaccggcaaaattgccgccttatccatacttttgaaaaaactgaccggggtgcgcctgatatttgtcaaacataatgttgtcgccaacaaaactgatttttatcaccgcctgatacagaaaaacaccgaccgctttatttgcgtttcccgtctggtttacgatgtgcaaaccgccgacaatccctttaaagaaaaataccggattgttcataacggtatcgataccggccgtttccctccccctcaagaaaaacccgacagccgtttttttaccgtcgcctacgccggcaggatcagtccggaaaaaggattggaaaacctgattgaagcctgtgtgatactgcatcggaaatatcctcaaatcaggctcaaattggcaggggacggacatccggattatatgtgtcgcctgaagcgggacgtatctgcttcgggagcagaaccatttgtttcttttgaagggtttaccgaaaaacttgcttcgttttaccgccaaagcgatgtcgtggttttgcccagcctcgtcccggaggcattcggtttgtcattatgcgaggcgatgtactgccgaacggcggtgatttccaatactttgggcgcgcaaaaggaaattatcgaacatcatcaatcggggattctgctggataggctgacacctgaatctttggcggacgaaatcgaacgcctcgtcttaaaccctgaaacgaaaaacgcactggcaacggcaggacatcaatgcgtcgccaaccgttttaccatcaaccataccgccgacaaattattggatgcaata

SEQ ID NO: 80 - protein, 354 aa, Neisseria meningitidis
MEKEFRILNIVSAKIWGGGEQYVYDVSKALGLRDCTMFTAVNKNNELMHRRFSEVSSVFTTRLHTLNGLFSLYALTRFIRKNRISHLMIHTGKIAALSILLKKLTGVRLIFVKHNVVANKTDFYHRLIQKNTDRFICVSRLVYDVQTADNPFKEKYRIVHNGIDTGRFPPPQEKPDSRFFTVAYAGRISPEKGLENLIEACVILHRKYPQIRLKLAGDGHPDYMCRLKRDVSASGAEPFVSFEGFTEKLASFYRQSDVVVLPSLVPEAFGLSLCEAMYCRTAVISNTLGAQKEIIEHHQSGILLDRLTPESLADEIERLVLNPETKNALATAGHQCVANRFTINHTADKLLDAI

SEQ ID NO: 81 - DNA, 795 bp, Neisseria meningitidis
  CDS (1)..(795)
atggcggctgttttttctgtatgtgcctgttttatgtgttcctgccttgttgtcaaaaataccgttatcggaagcggacgcaccaaaatcgccgtgccgcttgtcgcccgcgatgccgccgtactttccgccgtacttgaccaaatcaaaaacctgcccttcgatatcgtcgagttccgcgccgattttttggaatgcgcgggcagcatcggcgaagtattgcgccacacgcagaccgtccgcgacgcgctacccgacaagccgctgctgtttacgttcagacggcatggcgaaggcggctcgttcccgtgttcggacgattattattttgaactgctcgacgcgctgatcgaaagccgcctgcccgacatcatcgacatcgagctgttttccggcgaaaccgccgtccggtgcgccgtggcaaatgctcaaaaaaacggcatcgccgccctgctctgcaatcatgagtttcaccgcacgccgccgcaagaagaaatcgtatgccgtctgaaacagatggaggactgcggcgcggacatctgcaaaattgcggtgatgccgcaaagcgcggaagatgtgctgactttgctttccgccacgctcaaagcgaaagagcttgccgccaaaccgattgttacgatgtcgatggggcagacgggggcggtcagccggcttgccggacaggtgttcggctcaagcatcacgttcggttcgggaacgcaaaactccgcgccggggcaaatcggcgtatccgccctccgtgcgacactcgactgcctcgaaaacggagcagac

SEQ ID NO: 82 - protein, 265 aa, Neisseria meningitidis
MAAVFSVCACFMCSCLVVKNTVIGSGRTKIAVPLVARDAAVLSAVLDQIKNLPFDIVEFRADFLECAGSIGEVLRHTQTVRDALPDKPLLFTFRRHGEGGSFPCSDDYYFELLDALIESRLPDIIDIELFSGETAVRCAVANAQKNGIAALLCNHEFHRTPPQEEIVCRLKQMEDCGADICKIAVMPQSAEDVLTLLSATLKAKELAAKPIVTMSMGQTGAVSRLAGQVFGSSITFGSGTQNSAPGQIGVSALRATLDCLENGAD

SEQ ID NO: 83 - DNA, 876 bp, Neisseria meningitidis
  CDS (1)..(876)
ttgaccgtccgaacgaaaaagacggcgcattataccctattccattccgaccgaaaaccgaacatgactactctcaaacccgccctgcccgcttatctggacaacatccgcatcatcctcacgcgcaccagccatcccgccaacatcggctctgccgcgcgcgcgatgaaaacaatgggtctgcacaaactgaccatcgtcgccccaaatctgatggcaacgccgatgacggaaaacccgcccgtgtttgacccggagcatcctcaatcgtttaaattaccggaagaaagcttcatcctcgcttccggcgcggcagacgttttggaaaatgccaccattgccgcttctttggacgaagcccttgccgacaccaccatcgcctgcgccctgaccagccgccgccgcgaaattactgcgccgctgcaaaccccgcgcgatttggtatccgaattactgcagaccgcaaaccgaggcgagaaagtggcactggttttcggcaacgagactttcggcttgagcatcgaagaagtccaagcctgcaaccgactgatgaccatcaacggcaatcccgactatttctcgctcaacctcgcccaagccgtgcaggtcgtgtgctacgaaatcttcagccaaaccggttcgcccatgacccatcttcaacaagaagaccacgctgcgacccacgagcaaatcaaaggcatggtcgcccacatggaaagcgtgatgaacgacatcggctttttcaaccgccgcaacggcgagcgtctgatgcgccgtatgcagagcctgttcggacgcgccaacacgcaaaccgaagacatcgatatcctgcgcggttttttcaataccgtcagccatcgtatccataaaaaagac

SEQ ID NO: 84 - protein, 292 aa, Neisseria meningitidis
LTVRTKKTAHYTLFHSDRKPNMTTLKPALPAYLDNIRIILTRTSHPANIGSAARAMKTMGLHKLTIVAPNLMATPMTENPPVFDPEHPQSFKLPEESFILASGAADVLENATIAASLDEALADTTIACALTSRRREITAPLQTPRDLVSELLQTANRGEKVALVFGNETFGLSIEEVQACNRLMTINGNPDYFSLNLAQAVQVVCYEIFSQTGSPMTHLQQEDHAATHEQIKGMVAHMESVMNDIGFFNRRNGERLMRRMQSLFGRANTQTEDIDILRGFFNTVSHRIHKKD

SEQ ID NO: 85 - DNA, 1545 bp, Neisseria meningitidis
  CDS (1)..(1545)
gtgcgtctcaatcatttcataatgatagcgattattatatatgtgatttcccctgcaaacaagccggcccgccgccacagcgttcccacttatccggctttgccttataattgctttttttatgtaacagatttacctatgaatttccccaaaacagcggcctccctgctgctgcttctcgcctccctcgccgcacacgcgctcgatacaggtcgcattccgcaaaacgaaatcgccgtatatgtccaagagcttgacagcggaaaagtcatcattgaccaccgctcggatgtccccgtcaaccccgcctccacaatgaaactcgttaccgcgtttgccgccttcaaaaccttcggcagcaattaccgctgggcgaccgagtttaaaagcaacggtacggtaaacgacggcacgcttgacggaaacctgtattgggcgggcagcggcgaccccgttttcaatcaggaaaacctgcttgccgtccaacgccagttgcgcgaacaaggcatacgcaatatcacgggacacctgatgctcgaccacagcctgtggggcgaagtcggcagccccgacgatttcgaagccgacagcggttcgccgtttatgacgccccccaatccaactatgctgtctgccggtatggttatggtgcgcgccgaacgcaatgccgccgacagtaccgacatcctcaccgatccgcctttgccgcatattttcgcccaaaacaacttgaaaattaccgcctcccaagctgcctgcccttcgatcaaaaaactgatgcgtgcatctttttcggacaatacgctgaaattgcgcggcaatattcccgagagctgtttgggcaagcctgtcggtgtccggatgttcgcgcttgacgaactgatccggcaaagttttaccaaccactggctgctcggcggcggacggatttcagacggcatcggcatatccgacacgccggaaggcgcgcagacgcttgccgttgcacactcaaagccgatgaaggaaattttgacggacatgaacaagcgttcggacaatctaattgcgcgttccgtcttcctcaaactcggcggcgacggcaaactgcccgccgtttccgaacaggcagcgtctgccgtccggcgtgaacttgccgtgtcgggcatcgatgttgcggatttggttttggaaaacggttcaggtctgtccagaaaagaaagggtaacggcgagaatgatggcgcaaatgttggaaacggcttatttcagcccgtttgcacaagatttcatcgatacgctgcccatcgccggcacagacgggactttacgcaaccgcttcaaacaaagcggcgggctgttgcgcttaaaaaccggcacgctcaacaatgtccgcgcccttgcaggttattggctgggcgacaaaccgatggcggtggtcgtcatcatcaacagcggccgcgccgtttccctgctgcccgacttggacaacttcgttgccaacaacatcatctccggcggcgatggctggctggatgcgaaactgatgtgcaaagaacgccgagcc

SEQ ID NO: 86 - protein, 515 aa, Neisseria meningitidis
VRLNHFIMIAIIIYVISPANKPARRHSVPTYPALPYNCFFYVTDLPMNFPKTAASLLLLLASLAAHALDTGRIPQNEIAVYVQELDSGKVIIDHRSDVPVNPASTMKLVTAFAAFKTFGSNYRWATEFKSNGTVNDGTLDGNLYWAGSGDPVFNQENLLAVQRQLREQGIRNITGHLMLDHSLWGEVGSPDDFEADSGSPFMTPPNPTMLSAGMVMVRAERNAADSTDILTDPPLPHIFAQNNLKITASQAACPSIKKLMRASFSDNTLKLRGNIPESCLGKPVGVRMFALDELIRQSFTNHWLLGGGRISDGIGISDTPEGAQTLAVAHSKPMKEILTDMNKRSDNLIARSVFLKLGGDGKLPAVSEQAASAVRRELAVSGIDVADLVLENGSGLSRKERVTARMMAQMLETAYFSPFAQDFIDTLPIAGTDGTLRNRFKQSGGLLRLKTGTLNNVRALAGYWLGDKPMAVVVIINSGRAVSLLPDLDNFVANNIISGGDGWLDAKLMCKERRA

SEQ ID NO: 87 - DNA, 840 bp, Neisseria meningitidis
  CDS (1)..(840)
atggataaagaacgaattttaacccccgcagtcgtgttttccgtcgcactgctgcatttggcaatggtggcattgctctggcaggcgcacaagctgcccgtgatagagtcaggcaatgttattgaatttgtcgatttgggcgattttggcggaggggacggcgcacccgaaggtgcaggcgcgcctgccgcgcccgaaccgcaacccgtgcccgagccgcccaaacctgtcgagccgcccaagccggttttgaagccggtggttacgaaaaaggcggatgcggatattcagcagcctaaggaagagccgaaacctgaagaaaagccgaaacccgaagaaaaaccgaaaccagagcctaagccggaagcgaagcctgtcccgaaaccggcggaaaaaccggtcgagaagccgtctgaaaaacctgccgaacatcccggcaatgcttctgccaaagcagacagcgagcagggcaatggggaagataagggaaccggtatcaaaggagacggaacggggcgcggagaaggcagcggtaaaggtagcggcggtgtcaaaggcgaacacggggaaggagccggcagcagcaaaggcaatcctttacgcgccaacggcagcattccgcgcccggcttatcccacgctttctatggagaatgatgagcagggtacggttgttttgagcgttttggtttctccgggcggtcatgttgagtccgttaaaatcgtgaaaagcagtggtttttcccggttggacaatgcggcacgcaaggcggcgcaaaacgggcattttcaagccaatgcctggacggagtttaaagtccccgtcaagtttgaattgaat

SEQ ID NO: 88 - protein, 280 aa, Neisseria meningitidis
MDKERILTPAVVFSVALLHLAMVALLWQAHKLPVIESGNVIEFVDLGDFGGGDGAPEGAGAPAAPEPQPVPEPPKPVEPPKPVLKPVVTKKADADIQQPKEEPKPEEKPKPEEKPKPEPKPEAKPVPKPAEKPVEKPSEKPAEHPGNASAKADSEQGNGEDKGTGIKGDGTGRGEGSGKGSGGVKGEHGEGAGSSKGNPLRANGSIPRPAYPTLSMENDEQGTVVLSVLVSPGGHVESVKIVKSSGFSRLDNAARKAAQNGHFQANAWTEFKVPVKFELN

SEQ ID NO: 89 - DNA, 1584 bp, Neisseria meningitidis
  CDS (1)..(1584)
atggcacttttcctcagcatattccccatcgtcctgctgatttggctgatggtgaaaaaaaacagtatgccctcctacgtcgcgctgccgattaccgcagtgctgatttacgccatcaaacttttctacttcgacgatgcgggcatgctgctcaacgccaccgccgcttccggcctcgtcaaaacgctcacgccgattaccgtgattttcggcgcgattatgttcaaccgtatgatggaaaccacgggctgcatcgatgtcatccgcaaatggctggcgaccatcagccccaaccccgtagcgcaactgatgattatcggctgggcttttgcctttatgattgaaggcgcatccggcttcggcacgcctgccgcgattgccgcgccgattctgatgagcttgggcttcaacccgttgaaagtggcgattttcactttggtgatgaactccgtccccgtctctttcggcgcggtcggtacgccgacctggttcggtttcgcaccgctgaacctgagtgccgaagacatcctcgccatcggcaggcagaccggcgtaatgcacttcttcgcaggtttcgtcatccccgtcatcggcttgggcttcatcgtaccttggtctgaaatccgcaaaaacttgggcttcgtcgccattgccgtcttctcctgcaccattccttatgtcgcattggcgatggtcaacgaagaattcccgtcgctcgtcgccggcgcgatcggcctgatggtgtccgtattcgccgccaaccaaggctggggcttgagcaaagaccacgccaaagacccgaatgccgaaaaagtgccgttcgcccaagtcgccaaagcactcgcccctttgggtatgctgatcggcatgctggtggttacgcgcatcaaacagctcggcatcaaaggcattttgaccagcaaagaagaatggttcagcttccaactgccgtttgatttgtccaaaatcaccgtcagcgactccctgacgattactttcggcaatattttcggacaagatgtcagcgcgtcttaccaaacgctgtacgtcccggcttggattccgtttgtgctgaccgtttggatttgcatcctgctgtataaaaccaaattcaaagatgcctggacgatttattccgtaactttcaatcaaaccaaaaaaccgctgcttgccctgatgggcgcgctgattatggttcagctgatgctggtcggcggcgacaattcgatggtgaaaatcatcggtaaggaatttgccgcaatggcgggcgaacactgggtttatttctcgccgtatctgggcgcgatcggtgcgttcttctccggttccaacaccgtgtccaacctgaccttcggcccgattcagcagcaaatcgccttggataccggcctgtccgttaccctgattctggcgttgcagtccgtcggcggcgcgatgggcaatatggtgtgcctcaacaacatcatcgccgtatgtaccgtattggatgtgaaaaattccgaaggtgcgattatcaagaaaaccgttatcccgatggcgatttacggcgtgattgccgtcgtcgcggcaatgattttcttcctc

SEQ ID NO: 90 - protein, 528 aa, Neisseria meningitidis
MALFLSIFPIVLLIWLMVKKNSMPSYVALPITAVLIYAIKLFYFDDAGMLLNATAASGLVKTLTPITVIFGAIMFNRMMETTGCIDVIRKWLATISPNPVAQLMIIGWAFAFMIEGASGFGTPAAIAAPILMSLGFNPLKVAIFTLVMNSVPVSFGAVGTPTWFGFAPLNLSAEDILAIGRQTGVMHFFAGFVIPVIGLGFIVPWSEIRKNLGFVAIAVFSCTIPYVALAMVNEEFPSLVAGAIGLMVSVFAANQGWGLSKDHAKDPNAEKVPFAQVAKALAPLGMLIGMLVVTRIKQLGIKGILTSKEEWFSFQLPFDLSKITVSDSLTITFGNIFGQDVSASYQTLYVPAWIPFVLTVWICILLYKTKFKDAWTIYSVTFNQTKKPLLALMGALIMVQLMLVGGDNSMVKIIGKEFAAMAGEHWVYFSPYLGAIGAFFSGSNTVSNLTFGPIQQQIALDTGLSVTLILALQSVGGAMGNMVCLNNIIAVCTVLDVKNSEGAIIKKTVIPMAIYGVIAVVAAMIFFL

SEQ ID NO: 91 - DNA, 1686 bp, Neisseria meningitidis; identical to SEQ ID NO: 7
  CDS (1)..(1686)

SEQ ID NO: 92 - protein, 562 aa, Neisseria meningitidis; identical to SEQ ID NO: 8

SEQ ID NO: 93 - DNA, 1126 bp, Neisseria meningitidis
  CDS (1)..(1125)
atgaacacctcgcaacgcaaccgcctcgtcagccgctggctcaactcctacgaacgctaccgctaccgccgcctcatccacgccgtccggctcggcggggccgtcctgttcgccaccgcctccgcccggctgctccacctccaacacggcgagtggatagggatgaccgtcttcgtcgtcctcggcatgctccagtttcaaggggcgatttactccaaggcggtggaacgtatgctcggcacggtcatcgggctgggcgcgggtttgggcgttttatggctgaaccagcattatttccacggcaacctcctcttctacctcaccgtcggcacggcaagcgcactggccggctgggcggcggtcggcaaaaacggctacgtccctatgctggcggggctgacgatgtgcatgctcatcggcgacaacggcagcgaatggttcgacagcggcctgatgcgcgcgatgaacgtcctcatcggcgcggccatcgccatcgccgccgccaaactgctgccgctgaaatccacactgatgtggcgtttcatgcttgccgacaacctgaccgactgcagcaaaatgattgccgaaatcagcaacggcaggcgcatgacccgcgaacgcctcgaagagaacatggcgaaaatgcgccaaatcaacgcacgcatggtcaaaagccgcagccacctcgccgccacatcgggcgaaagccgcatcagccccgccatgatggaagccatgcagcacgcccaccgtaaaattgtcaacaccaccgagctgctcctgaccaccgccgccaagctgcaatctcccaaactcaacggcagcgaaatccggctgcttgaccgccacttcacactgctccaaaccgacctgcaacaaaccgtcgcccttatcaacggcagacacgcccgccgcatccgcatcgacaccgccatcaaccccgaactggaagccctcgccgaacacctccactaccaatggcagggcttcctctggctcagcaccaatatgcgtcaggaaatttccgccctcgtcatcctgctgcaacgcacccgccgcaaatggctggatgcccacgaacgccaacacctgcgccaaagcctgcttgaaacacgggaacacagtt

SEQ ID NO: 94 - protein, 375 aa, Neisseria meningitidis
MNTSQRNRLVSRWLNSYERYRYRRLIHAVRLGGAVLFATASARLLHLQHGEWIGMTVFVVLGMLQFQGAIYSKAVERMLGTVIGLGAGLGVLWLNQHYFHGNLLFYLTVGTASALAGWAAVGKNGYVPMLAGLTMCMLIGDNGSEWFDSGLMRAMNVLIGAAIAIAAAKLLPLKSTLMWRFMLADNLTDCSKMIAEISNGRRMTRERLEENMAKMRQINARMVKSRSHLAATSGESRISPAMMEAMQHAHRKIVNTTELLLTTAAKLQSPKLNGSEIRLLDRHFTLLQTDLQQTVALINGRHARRIRIDTAINPELEALAEHLHYQWQGFLWLSTNMRQEISALVILLQRTRRKWLDAHERQHLRQSLLETREHS

SEQ ID NO: 95 - DNA, 1725 bp, Neisseria meningitidis; identical to SEQ ID NO: 29
  CDS (1)..(1725)

SEQ ID NO: 96 - protein, 575 aa, Neisseria meningitidis; identical to SEQ ID NO: 30

SEQ ID NO: 97 - DNA, 570 bp, Neisseria meningitidis
  CDS (1)..(570)
atggacaatcacgccgaagcacactggcaaaacggctggcttcaaagcatacgccataccccgtcgcccaatttcagcccgagggaaacgggggaaacggtttccctgatcgtgttgcacaacatttcactgccgccgttcgaatacggcacggatgctgtggaaaagctgtttgccaaccggctcgaccccaacggacatccgttcttcagcctgatacacactttgcgcgtatccagccatttcttaatcaaacgcgacggcaaaacggtgcagttcgtatcatgcggcgatatggcgtaccacgcgggcgtatcctcgtttcgcggacgggaaaaatgcaacgcattttccatcggcatcgaattggaaggctgcgatttcgaaccctttaccgaagcgcaataccgttcgctcgaaacattgttggaagcactctgccgccgctaccccgttaccgcagtaaccggacatcaggacatcgcgcccggccgcaaaaccgaccccggccactttttcgactggcggcggatacgggagaaagggtttcccgtagacagaaatgccgtc

SEQ ID NO: 98 - protein, 190 aa, Neisseria meningitidis
MDNHAEAHWQNGWLQSIRHTPSPNFSPRETGETVSLIVLHNISLPPFEYGTDAVEKLFANRLDPNGHPFFSLIHTLRVSSHFLIKRDGKTVQFVSCGDMAYHAGVSSFRGREKCNAFSIGIELEGCDFEPFTEAQYRSLETLLEALCRRYPVTAVTGHQDIAPGRKTDPGHFFDWRRIREKGFPVDRNAV

SEQ ID NO: 99 - DNA, 1515 bp, Neisseria meningitidis
  CDS (1)..(1515)
atgttgtatttcagatacggttttttggttgtttggtgtgcggcaggtgtttctgccgcctatggggcggatgcgcccgcgattttggatgacaaggcattgttgcaggtgcagcggtcggtgtcggataagtgggcggaatcggattggaaagttgacaatgatgccccgcgcgtggttgacggggattttttgttggcgcatccgaaaatgttggaacatagtttgcgcgacgtgctcaacggcaatcaggcggatttgatcgcttcgttggcggatttgtatgccaagctgccggattatgacgcggttttgtacggcagggcgcgggctttgctggcgaaattggcgggaaggccggcggaggcggtggcgcggtatcgggaactgcacggggaaaatgcggcagacgagcggattttgctggatttggcggcggcggagtttgacgatttccggctgaagtcggcagaaaggcattttgccgaggcggaaaaattggatttgccggcgccggttttggaaaatgtggggcgttttcggaaaaaagcggaggggctgacgggctggcgtttttcgggcggcatcagtccggcggtcaatagaaatgccaataatgccgcgccgcagtattgccggcaaaacggaggccggcagatatgcagtgtcagccgggcggagcgggcggcaggcttgaattatgaaatcgaggcggaaaaactgacggcgttggcagataatcattatttgttgttccgttccaatatcggcggcacgagctattatttcagtaaaaaatcagcttatgacgacgggttcggcagagcgtatttgggttggcagtataaaaatgcacggcagacggcggggattttgccgttttatcaggtgcagttgtcgggcagcgacggctttgatgcgaaaacaaaacgggtaaacaaccgccgcctgccgccgtatatgctggcgcacggagtcggcgtgcagttgtcccatacttaccgcccaaacccgggatggcaattttcggtcgcgctggaacattaccgccaacgctaccgcgaacaggatagggcggaatacaataacggtcggcaggacgggttttatgtttcgtcggcaaaacgtttgggcgaatcggcaactgtgttcggcggctggcagtttgtgcggtttgtgccgaaacgcgaaacggtgggcggcgcggtcaataatgccgcctaccggcgcaacggtgtttatgccggctgggcgcaggagtggcggcagttgggcggtttgaacagtcgggtttccgcgtcttatgcccgccgcaactataagggcgttgcggctttctcgacagaggcgcaacgcaaccgcgaatggaatgtctcgctggctttgagccacgacaagttgtcgtacaaaggtatcgtgcccgcgttgaattatcgtttcggcaggacggaaagtaatgtgccgtatgcgaaacgccgcaacagcgaggtgtttgtgtcggcggattggcggttt

SEQ ID NO: 100 - protein, 505 aa, Neisseria meningitidis
MLYFRYGFLVVWCAAGVSAAYGADAPAILDDKALLQVQRSVSDKWAESDWKVDNDAPRVVDGDFLLAHPKMLEHSLRDVLNGNQADLIASLADLYAKLPDYDAVLYGRARALLAKLAGRPAEAVARYRELHGENAADERILLDLAAAEFDDFRLKSAERHFAEAEKLDLPAPVLENVGRFRKKAEGLTGWRFSGGISPAVNRNANNAAPQYCRQNGGRQICSVSRAERAAGLNYEIEAEKLTALADNHYLLFRSNIGGTSYYFSKKSAYDDGFGRAYLGWQYKNARQTAGILPFYQVQLSGSDGFDAKTKRVNNRRLPPYMLAHGVGVQLSHTYRPNPGWQFSVALEHYRQRYREQDRAEYNNGRQDGFYVSSAKRLGESATVFGGWQFVRFVPKRETVGGAVNNAAYRRNGVYAGWAQEWRQLGGLNSRVSASYARRNYKGVAAFSTEAQRNREWNVSLALSHDKLSYKGIVPALNYRFGRTESNVPYAKRRNSEVFVSADWRF

SEQ ID NO: 101 - DNA, 1476 bp, Neisseria meningitidis
  CDS (1)..(1476)
atgaaatacaaagacctgcgcgacttcatcgccatgctcgagcagcagggcaaactcaaacgcatcgcgcaccccgtttccccgcatttggaaatgaccgaaatcgccgaccgcgtgctgcgcgccgaagggccggcgttgttgtttgaacacccagttaagcccgacggtacgcgctatgattatcccgtgttggcaaacctgttcggcacgcccgaacgtgtggcgatgggcatgggcgcggacagcgtgtccaagctgcgcgaaatcgggcagacgctggcgtatttgaaagaacccgaaccgcccaaaggcattaaagacgcgttttccaaactgccgctcttgaaagacatttggagcatggcgccgaacgtggtgaaaaatgcgccgtgtcaggaaatcgtatgggaaggcgaagacgttgatttgtatcaacttccgattcagcattgctggccggaagacgttgcgccgctggtaacgtggggcttgaccgtcacgcgcgggccgcacaaaaaacgccaaaatctcggcatttaccgccaacaattaatcggcataaacaagctgattatgcgctggctgtcgcatcgcggcggcgcgctggattatcaggaattccgcaaactcaatcccgatacgccgtatcccgtcgccgtcgtgctcggctgcgaccctgccaccattttgggcgcggtaacgcccgttcccgataccttgagcgaataccagtttgccggactgctgcgcggttcgcggacggaactggtgaaatgtatcggcaacgatttgcaagtgcctgcccgcgcagaaatcgtgttggaaggcgtcatccatccaaacgaaaccgcgttggaaggtccatacggcgaccacacgggctattacaacgagcaggaccatttccccgtgtttacggtcgaacgcatcaccatgcgcgaaaacccgatttaccactctacctacacaggcaaaccgcccgatgaacccgccgttttgggcgtggcgttgaacgaagtgttcgtaccgcttttgcaaaagcagttccccgaaatcaccgatttttacctgccgcccgaaggctgctcctaccgcatggcggtggtgagcatgaaaaaacagtacgccggacacgccaagcgcgtgatgatgggctgctggtcgttcctgcgccagtttatgtacaccaaattcatcattgtggtggatgacgatgtggatgtgcgcgactggaaagaagtcatctgggcggtaaccacgcgcatggaccccgtgcgcgataccgttttgatggaaaacacgcccatcgactacctcgacttcgccagccccgtcagcggacttggcggcaaaatgggtttggatgcgaccaacaagtggccgggcgaaaccgaccgcgaatggggacgggtgattaaaaaagaccctgcggttacggctaagattgatgagatttgggaggaattggggttg

SEQ ID NO: 102 - protein, 492 aa, Neisseria meningitidis
MKYKDLRDFIAMLEQQGKLKRIAHPVSPHLEMTEIADRVLRAEGPALLFEHPVKPDGTRYDYPVLANLFGTPERVAMGMGADSVSKLREIGQTLAYLKEPEPPKGIKDAFSKLPLLKDIWSMAPNVVKNAPCQEIVWEGEDVDLYQLPIQHCWPEDVAPLVTWGLTVTRGPHKKRQNLGIYRQQLIGINKLIMRWLSHRGGALDYQEFRKLNPDTPYPVAVVLGCDPATILGAVTPVPDTLSEYQFAGLLRGSRTELVKCIGNDLQVPARAEIVLEGVIHPNETALEGPYGDHTGYYNEQDHFPVFTVERITMRENPIYHSTYTGKPPDEPAVLGVALNEVFVPLLQKQFPEITDFYLPPEGCSYRMAVVSMKKQYAGHAKRVMMGCWSFLRQFMYTKFIIVVDDDVDVRDWKEVIWAVTTRMDPVRDTVLMENTPIDYLDFASPVSGLGGKMGLDATNKWPGETDREWGRVIKKDPAVTAKIDEIWEELGL

SEQ ID NO: 103 - DNA, 1089 bp, Neisseria meningitidis
  CDS (1)..(1089)
atgagtttgaaatgcggcatcgtcggtttgcccaacgtcggcaaatccaccctttttaacgcgctgacccaatcgggtatcgaagcggcaaactatcctttctgtaccatcgaacccaacgtcggcatcgtcgaagtccccgatccgcgtatggccgaattggcaaaaatcgtcaatccgcaaaaaatgcagcctgccatcgtcgaatttgtcgatattgccggtttggttgcaggcgcgagcaaaggcgagggcttgggcaaccagttccttgccaacatccgcgaaaccgatgcgattgtgaatgtcgtgcgctgctttgacgacgacaacatcgtccacgttgcaggccgcgtcgatccgattgccgacattgaaaccatcggcacagagttggcacttgccgacctggcaagtgtcgaaaaagccatcgtccgcgaagaaaaacgcgcccgctcaggcgacaaagacgcgcaaaagctggtcgatttgtgcaaaaaactgctgccgcatctggacgaaggcaaacccgtgcgttccttcggtttggacgcggaagaacgcgcgatgctcaaaccgctgttcctgctgaccgccaaaccggcgatgtatgtgggcaacgtcgccgaagacggttttgaaaacaatccgcacctcgaccgcctgaaagaattggcggcaaaagaaaacgcccccgtcgtcgccgtttgcgccgcgatggagagcgaaattgccgaattggaagacgacgaaaaagccgagttcctcgccgaaatgggcttggaagaaccgggcctgaaccgcctgattcgtgccggttacgacctcttggggctgcaaacctatttcaccgccggtgtgaaagaagtccgcgcgtggacgatacacaaaggcgataccgccccgcaagccgccggcgtgattcacaccgactttgagcgcggcttcatccgcgcccaagtcatttcttacgacgactttgtctcgctcggcggcgaagccaaagccaaagaagccggcaaaatgcgtgtggaaggtaaggaatacgtcgtgcaggacggcgatgtaatgcactttttgtttaacgtg

SEQ ID NO: 104 - protein, 363 aa, Neisseria meningitidis
MSLKCGIVGLPNVGKSTLFNALTQSGIEAANYPFCTIEPNVGIVEVPDPRMAELAKIVNPQKMQPAIVEFVDIAGLVAGASKGEGLGNQFLANIRETDAIVNVVRCFDDDNIVHVAGRVDPIADIETIGTELALADLASVEKAIVREEKRARSGDKDAQKLVDLCKKLLPHLDEGKPVRSFGLDAEERAMLKPLFLLTAKPAMYVGNVAEDGFENNPHLDRLKELAAKENAPVVAVCAAMESEIAELEDDEKAEFLAEMGLEEPGLNRLIRAGYDLLGLQTYFTAGVKEVRAWTIHKGDTAPQAAGVIHTDFERGFIRAQVISYDDFVSLGGEAKAKEAGKMRVEGKEYVVQDGDVMHFLFNV

SEQ ID NO: 105 - DNA, 1177 bp, Neisseria meningitidis
  CDS (1)..(1176)
atggcaaaaatgatgaaatgggcggctgttgcggcggtcgcggcggcagcggtttggggcggatggtcttatctgaagcccgagccgcaggctgcttatattacggaaacggtcaggcgcggcgacatcagccggacggtttctgcaacaggggagatttcgccgtccaacctggtatcggtcggcgcgcaggcatcggggcagattaagaaactttatgtcaaactcgggcaacaggttaaaaagggcgatttgattgcggaaatcaattcgacctcgcagaccaatacgctcaatacggaaaaatccaaattggaaacgtatcaggcgaagctggtgtcggcacagattgcattgggcagcgcggagaagaaatataagcgtcaggcggcgttgtggaaggatgatgcgaccgctaaagaagatttggaaagcgcacaggatgcgcttgccgccgccaaagccaatgttgccgagctgaaggctctaatcagacagagcaaaatttccatcaataccgccgagtcggaattgggctacacgcgcattaccgcaacgatggacggcacggtggtggcgattctcgtggaagaggggcagactgtgaacgcggcgcagtctacgccgacgattgtccaattggcgaatctggatatgatgttgaacaaaatgcagattgccgagggcgatattaccaaggtgaaggcggggcaggatatttcgtttacgattttgtccgaaccggatacgccgattaaggcgaagctcgacagcgtcgaccccgggctgaccacgatgtcgtcgggcggctacaacagcagtacggatacggcttccaatgcggtctactattatgcccgttcgtttgtgccgaatccggacggcaaactcgccacggggatgacgacgcagaatacggttgaaatcgacggtgtgaaaaatgtgctgattattccgtcgctgaccgtgaaaaatcgcggcggcagggcgtttgtgcgcgtgttgggtgcagacggcaaggcggcggaacgcgaaatccggaccggtatgagagacagtatgaataccgaagtaaaaagcgggttgaaagagggggacaaagtggtcatctccgaaataaccgccgccgagcagcaggaaagcggcgaacgcgccctaggcggcccgccgcgccgat

SEQ ID NO: 106 - protein, 392 aa, Neisseria meningitidis
MAKMMKWAAVAAVAAAAVWGGWSYLKPEPQAAYITETVRRGDISRTVSATGEISPSNLVSVGAQASGQIKKLYVKLGQQVKKGDLIAEINSTSQTNTLNTEKSKLETYQAKLVSAQIALGSAEKKYKRQAALWKDDATAKEDLESAQDALAAAKANVAELKALIRQSKISINTAESELGYTRITATMDGTVVAILVEEGQTVNAAQSTPTIVQLANLDMMLNKMQIAEGDITKVKAGQDISFTILSEPDTPIKAKLDSVDPGLTTMSSGGYNSSTDTASNAVYYYARSFVPNPDGKLATGMTTQNTVEIDGVKNVLIIPSLTVKNRGGRAFVRVLGADGKAAEREIRTGMRDSMNTEVKSGLKEGDKVVISEITAAEQQESGERALGGPPRR

SEQ ID NO: 107 - DNA, 1185 bp, Neisseria meningitidis
  CDS (1)..(1185)
atgacagaggacgaacgtttcgcgtggctgcaattggcgtttacgccctatatcggcgcggaaagtttcctgctgctgatgcgccgtttcggcagcgcgcaaaatgccctgtccgcaccggcggaacaggtggcggcactgatacggcacaaacaggcgcttgaggcttggcgcaatgcggaaaaacgcgctctggcgcggcaggcggcagaagcggcgttggaatgggaaatgcgggacggatgccgcctgatgctgcttcaggatgaagatttccccgaaatgctgacgcaggggctgaccgcgccgccggttttgtttttgcgcggcaacgtgcggctgctgcacaagccttccgccgccatcgtcggcagccgccatgccacgccgcaggcgatgcggattgccaaagatttcggcaagtcgttgggcgggcaaaatatccccgttgtgtcgggtatggcttccggtatcgatactgccgcccatcagggcgcactggaggcagaaggcggcaccatcgccgtgtgggggacgggtatagaccgcatttacccgccgtccaataaaaaccttgcctatgaaatcgccgaaaaaggattgattgtcagcgagtttcccatcggtacgcgcccgtatgccggcaattttccgcgccgcaaccgcctgattgccgccctgtcgcaagtaacgctggtggttgaagccgccttggaatccggttcgctgattaccgccggcctggcggcagaaatggggcgcgaagtgatggcggtacccggttcgatagacaatccgcacagcaaaggctgccacaaactgattaaagacggcgcaaaattggtggaatgcctggacgacatcctgaacgaatgcccggggctattgcaaaatacgggtgcttcatcatattctataaataaggatacgcccgacacgggacgccgcgccgttcagacggcatacgccccgccgcctgccgcaaaaatgccgtctgaagcggcggcaggcggcacagccgtcggcggcatactggataaaatgggtttcgaccccatccatcccgacgtgcttgccggacagttggctatgcctgccgcagatttgtatgccgcactgttggaattggaattggacggcagcgttgccgcaatgcccagcggcagataccagcgtatccgaact

SEQ ID NO: 108 - protein, 395 aa, Neisseria meningitidis
MTEDERFAWLQLAFTPYIGAESFLLLMRRFGSAQNALSAPAEQVAALIRHKQALEAWRNAEKRALARQAAEAALEWEMRDGCRLMLLQDEDFPEMLTQGLTAPPVLFLRGNVRLLHKPSAAIVGSRHATPQAMRIAKDFGKSLGGQNIPVVSGMASGIDTAAHQGALEAEGGTIAVWGTGIDRIYPPSNKNLAYEIAEKGLIVSEFPIGTRPYAGNFPRRNRLIAALSQVTLVVEAALESGSLITAGLAAEMGREVMAVPGSIDNPHSKGCHKLIKDGAKLVECLDDILNECPGLLQNTGASSYSINKDTPDTGRRAVQTAYAPPPAAKMPSEAAAGGTAVGGILDKMGFDPIHPDVLAGQLAMPAADLYAALLELELDGSVAAMPSGRYQRIRT

SEQ ID NO: 109 - DNA, 1257 bp, Neisseria meningitidis; identical to SEQ ID NO: 55
  CDS (1)..(1257)

SEQ ID NO: 110 - protein, 419 aa, Neisseria meningitidis; identical to SEQ ID NO: 56

SEQ ID NO: 111 - DNA, 1674 bp, Neisseria meningitidis
  CDS (1)..(1674)
atgagtttcaaaaccgatgccgaaatcgcccaatcctccaccatgcgcccgattggcgaaattgccgccaagctgggtttgaacgttgacaacattgagccttacggtcattacaaagccaaaatcaatcctgccgaagcgttcaaactgccgcaaaaacagggcaggctgattttggttaccgccatcaacccgactccggcgggcgaaggtaaaaccaccgtaaccatcggtttggcggacgcattgcgccatatcggcaaagactctgtgattgctttgcgcgagccttctttgggtccggtgttcggcgtgaaaggcggcgcggcaggcggcggctatgcccaagttttgccgatggaagacatcaacctgcacttcaccggagattttcacgccatcggtgcggcaaataatctgcttgccgcgatgctcgacaaccatatctaccaaggcaacgagttgaacatcgaccccaaacgcgtgctgtggcggcgcgtggtcgatatgaacgaccgccagttgcgcaacatcatcgacggcatgggcaagcctgttgacggcgtgatgcgtcctgacggtttcgatattaccgttgcttccgaagtgatggcggtattctgtcttgccaaagacatcagcgatttgaaagagcgtttgggcaacatccttgtcgcctacgccaaagacggcagccccgtttacgccaaagatttgaaagcgaatggcgcgatggcggcattgcttaaagatgcgattaagcccaacttggtgcaaaccatcgaaggcacgcccgccttcgtacacggcggcccgttcgccaacatcgcccacggctgcaactccgtaaccgcaacccgtctggcgaaacaccttgccgattacgccgtaaccgaagcaggcttcggcgcggacttgggcgcggaaaaattctgcgacatcaaatgccgccttgccggtttgaaacctgatgcggctgttgtcgtggcgactgtccgcgcgttgaaatataacggcggcgtggaacgcgccaacctcggcgaagaaaatttagacgctttggaaaaaggtttgcccaacctgctgaaacacatttccaacctgaaaaacgtattcggactgcccgtcgtcgttgcgctcaaccgcttcgtgtccgactccgatgccgagttggcgatgattgaaaaagcctgtgccgaacacggcgttgaagtttccctgaccgaagtgtggggcaaaggtggtgcgggcggcgcggatttggcgcgcaaagtcgtcaacgccattgaaagtcaaaccaataacttcggtttcgcctacgatgtcgagttgggcatcaaagacaaaatccgtgcgattgcccaaaaagtgtacggcgcggaagatgttgatttcagcgcggaagcgtctgccgaaatcgcttcactggaaaaactgggcttggacaaaatgccgatctgcatggcgaaaacccaatactctttgagcgacaacgccaaactgttgggctgccccgaagacttccgcatcgccgtgcgcggcatcaccgtttccgcaggcgcaggtttcatcgtcgccctgtgcggcaacatgatgaaaatgcccggcctgcccaaagttccggctgccgagaaaatcgatgtggacgcagaaggcgtgattcacggcttgttc

SEQ ID NO: 112 - protein, 558 aa, Neisseria meningitidis
MSFKTDAEIAQSSTMRPIGEIAAKLGLNVDNIEPYGHYKAKINPAEAFKLPQKQGRLILVTAINPTPAGEGKTTVTIGLADALRHIGKDSVIALREPSLGPVFGVKGGAAGGGYAQVLPMEDINLHFTGDFHAIGAANNLLAAMLDNHIYQGNELNIDPKRVLWRRVVDMNDRQLRNIIDGMGKPVDGVMRPDGFDITVASEVMAVFCLAKDISDLKERLGNILVAYAKDGSPVYAKDLKANGAMAALLKDAIKPNLVQTIEGTPAFVHGGPFANIAHGCNSVTATRLAKHLADYAVTEAGFGADLGAEKFCDIKCRLAGLKPDAAVVVATVRALKYNGGVERANLGEENLDALEKGLPNLLKHISNLKNVFGLPVVVALNRFVSDSDAELAMIEKACAEHGVEVSLTEVWGKGGAGGADLARKVVNAIESQTNNFGFAYDVELGIKDKIRAIAQKVYGAEDVDFSAEASAEIASLEKLGLDKMPICMAKTQYSLSDNAKLLGCPEDFRIAVRGITVSAGAGFIVALCGNMMKMPGLPKVPAAEKIDVDAEGVIHGLF

SEQ ID NO: 113 - DNA, 475 bp, Neisseria meningitidis
  CDS (1)..(474)
atggaacacctatttgaggaatggttgcccgacctgcccgccgacgtttcagacggcatcggcctgccgatgagccggttattgaaagcccggtcgctgactgccgcattgcgcgccttgccgcatctgttttcggtagaactgctgaaactgggcgaattggaaacggaatgcggagggcggctggtgcgcgaagttttgttgaagctggacggtatccctgttgtcgcggcaaggagcgaatgccgtatcggttcggcgttttggcaaaacattttggactgcggcacgcgtcctttgggcgaacgtctgtttcaagccgatttggaaggggcgcgttcggcgtttgagtttgccgttttcggcgaaggatgcggacggtactttgccgctcggcgttcgcggttttcccatcacggcgaggaaatgctgctgaccgagtattttctgcccgaactgaaacgctttatcggat

SEQ ID NO: 114 - protein, 158 aa, Neisseria meningitidis
MEHLFEEWLPDLPADVSDGIGLPMSRLLKARSLTAALRALPHLFSVELLKLGELETECGGRLVREVLLKLDGIPVVAARSECRIGSAFWQNILDCGTRPLGERLFQADLEGARSAFEFAVFGEGCGRYFAARRSRFSHHGEEMLLTEYFLPELKRFIG

SEQ ID NO: 115 - DNA, 1476 bp, Neisseria meningitidis; identical to SEQ ID NO: 101
  CDS (1)..(1476)

SEQ ID NO: 116 - protein, 492 aa, Neisseria meningitidis; identical to SEQ ID NO: 102

SEQ ID NO: 117 - DNA, 1515 bp, Neisseria meningitidis; identical to SEQ ID NO: 99
  CDS (1)..(1515)

SEQ ID NO: 118 - protein, 505 aa, Neisseria meningitidis; identical to SEQ ID NO: 100

SEQ ID NO: 119 - DNA, 756 bp, Neisseria meningitidis
  CDS (1)..(756)
atggaaacgcattcgggctgttttttgcggaagacggtaatgaaagacgatgttttgaaacagcaggcacacgcggcgatacagaagaaactgggctacgcgttccgcgatatttcgcttttgcggcaggctttgacgcacaggagccatcatgcgaagcacaacgagcggttcgagtttgtcggcgattcgattttgaattatacggtggcgcggatgctgtttgacgcgtttccgaagttgaccgagggcgagttgtcgcggttgcgggcaagtctggtcaatgagggcgtgctggcggaaatggcggcggaaatgaatgtcggcgacggcctgtacttgggggcgggcgagttgaagagcggcggcttcagacggccttcgatactggcggacgcgatggaggcgatgtttgcggcggtcagcttcgatgcggatttcaacacggcggaaaaggtggtgcgccatttgtttgcagaacgcgtccggcgagtcgatttccaaaatcaggcaaaagacggcaaaactgctttgcaggaggcgttgcaggcgcgccgtttcgccttgccgaaataccgtatcgaagagcaaatcggccatgccaacgacagtatgtttgtcatttcctgcgatttgggcgaactgggtttcgtgtgccgtgccaaagggacgagccgcaaggcggcggagcaggaagcggcgaaagaggctttgaaatggctggaagagaagctgccgctgaagaagaaaaagaaa

SEQ ID NO: 120 - protein, 252 aa, Neisseria meningitidis
METHSGCFLRKTVMKDDVLKQQAHAAIQKKLGYAFRDISLLRQALTHRSHHAKHNERFEFVGDSILNYTVARMLFDAFPKLTEGELSRLRASLVNEGVLAEMAAEMNVGDGLYLGAGELKSGGFRRPSILADAMEAMFAAVSFDADFNTAEKVVRHLFAERVRRVDFQNQAKDGKTALQEALQARRFALPKYRIEEQIGHANDSMFVISCDLGELGFVCRAKGTSRKAAEQEAAKEALKWLEEKLPLKKKKK

SEQ ID NO: 121 - DNA, 570 bp, Neisseria meningitidis; identical to SEQ ID NO: 97
  CDS (1)..(570)

SEQ ID NO: 122 - protein, 190 aa, Neisseria meningitidis; identical to SEQ ID NO: 98

SEQ ID NO: 123 - DNA, 2274 bp, Neisseria meningitidis; identical to SEQ ID NO: 71
  CDS (1)..(2274)

SEQ ID NO: 124 - protein, 758 aa, Neisseria meningitidis; identical to SEQ ID NO: 72

SEQ ID NO: 125 - DNA, 1137 bp, Neisseria meningitidis
  CDS (1)..(1137)
atgagccgtttatggttttttgccgcaaaaaacattataatccgccttatttacctattgcccaaggagacacaaatggcactcgtatccatgcgccaactgcttgatcatgctgccgaaaacagctacggcctgcccgcgttcaacgtcaacaacctcgaacaaatgcgcgccattatggaagccgccgaccaagtcaacgcgcccgtcatcgtacaggcgagcgcaggtgcgcgcaaatacgcgggcgcgccgtttttgcgccacctgattttggcggctgtcgaagaatttccgcacatccccgtcgtgatgcaccaagaccacggcgcatcgcccgacgtgtgccaacgctccatccaactgggcttttcctccgtgatgatggacggctcgctgatggaagacggcaaaaccccttcttcttatgaatacaacgtcaacgccacccgtaccgtggttaatttctcccacgcctgcggcgtatccgttgaaggcgaaatcggcgtattgggcaacctcgaaactggcgaagccggcgaagaagacggtgtaggcgcagtgggcaaactttcccacgaccaaatgctcaccagcgtcgaagatgccgtgcgtttcgttaaagataccggcgttgacgcattggcgattgccgtcggcaccagccacggcgcgtacaaattcacccgtccgcccacaggcgacgtgttgcgtatcgaccgcatcaaagaaatccaccaagccctgcccaatacacacatcgtgatgcacggctccagctccgttccgcaagaatggctgaaagtcatcaacgaatacggcggcaatatcggcgaaacctacggcgtgccggttgaagaaatcgtcgaaggcatcaaacacggcgtgcgtaaagtcaacatcgataccgacttgcgccttgcttccaccggcgcggtacgccgctaccttgccgaaaacccgtccgacttcgatccgcgcaaatatttgagcaaaaccattgaagcgatgaagcaaatctgcctcgaccgctacctcgcgttcggttgcgaaggtcaggcaggcaaaatcaaaccggtttccttggaaaaaatggcaaaccgttatgccaagggcgaattgaaccaaatcgtcaaa

SEQ ID NO: 126 - protein, 379 aa, Neisseria meningitidis
MSRLWFFAAKNIIIRLIYLLPKETQMALVSMRQLLDHAAENSYGLPAFNVNNLEQMRAIMEAADQVNAPVIVQASAGARKYAGAPFLRHLILAAVEEFPHIPVVMHQDHGASPDVCQRSIQLGFSSVMMDGSLMEDGKTPSSYEYNVNATRTVVNFSHACGVSVEGEIGVLGNLETGEAGEEDGVGAVGKLSHDQMLTSVEDAVRFVKDTGVDALAIAVGTSHGAYKFTRPPTGDVLRIDRIKEIHQALPNTHIVMHGSSSVPQEWLKVINEYGGNIGETYGVPVEEIVEGIKHGVRKVNIDTDLRLASTGAVRRYLAENPSDFDPRKYLSKTIEAMKQICLDRYLAFGCEGQAGKIKPVSLEKMANRYAKGELNQIVK

SEQ ID NO: 127 - DNA, 444 bp, Neisseria meningitidis
  CDS (1)..(444)
gtggatgctgcagcaacgctcctgacatacaaatgcccggcggaaaaccgcccaaacacaaaaaaaattggtaatttttcctattcaaggctacaattcgacacgcacagggcatctgcccgatttcacaatcataatagcggagttaaaaatatgacagctaaaggacaaatgttgcaagatcccttcctgaacgccctgcgtaaagagcatgttccggtttcgatttacttagttaacggtatcaaattgcaaggtcaggttgagtctttcgatcaatacgttgttctcctgagaaacacttccgtcacccaaatggtttacaaacacgccatttccaccatcgtaccggcacgctccgtcaacctacaacatgaaaacagaccccaagccgcaccgacttcgaccctcgtccaagtggaaaccgtccagcagcctgccgaa

SEQ ID NO: 128 - protein, 148 aa, Neisseria meningitidis
VDAAATLLTYKCPAENRPNTKKIGNFSYSRLQFDTHRASARFHNHNSGVKNMTAKGQMLQDPFLNALRKEHVPVSIYLVNGIKLQGQVESFDQYVVLLRNTSVTQMVYKHAISTIVPARSVNLQHENRPQAAPTSTLVQVETVQQPAE

SEQ ID NO: 129 - DNA, 1308 bp, Neisseria meningitidis
  CDS (1)..(1308)
atgtacgctaaaaaaggcggtttgggactggttaaaagccgccgtttcgcacctcttttcgctacgcagtttctcggcgcgttcaacgacaatgtgttcaaaaccgcgctgtttgtgatgattgggttttacggtttggggcaaaacggcttcctgcctgccggacagatgttgaacttgggcgcgttgctgtttattttgccgtatttcctgttttcctcgctgtcggggcagttgggtaacaaattcgacaaggccgttttggcgcgttgggccaaggtgctggaaatgatcattatggcggtggcggcatacgggttttatatccggtctgccccgctgcttttggcgtgtctgttttgcatgggcgcgcaatcgacgctgttcgggccgctgaaatacgccatcctgcccgattatctcgacgacaaagagttgatgatgggcaacagcctgattgaatcgggtacgtttgtcgccatcctgttcggtcagatactggggactgcggtggcaggtgtaccgccttatattgtcgggatactggttttgctggtcgccgtaggaggcacggtcggcagcctgtttatgccgtccgtacccgccaaggctgccgatacacaaattgagtggaatattgtccggggtacaaaatccctgctgcgtgaaacggtgcggcacaagcccgtttttaccgccattatcggtatttcgtggttttggtttgtcggcgcggtttataccacgcaactgccgacctttacccaaatccatctaggcggcaacgacaatgttttcaacctgatgcttgccctgttttccatcggtattgccgccggttcggtactgtgtgccaagttcagcagggaacggctgaggttggcttgggtaacggttggtgcgttgggtttgacggtttgcggcttggttttggtgtggctgacgcacggacaccgttttgaagggctgaacggcattttttggtttttatcgcaaggatgggcatatcccgtgatggcggtgatgacgctgatcggctttttcggcggatttttctccgttccgctctatacctggctgcaaaccgccagtagcgagactttccgcgcccgcgccgttgccgccaacaatatcgttaacggtatttttatggtttccgctgccgttttgagcgcggtgttgctgtttttgtttgacagcatttccttgttgtatctgattgtcgctttgggcaatattccgttgtcggtatttttgattaagcgcgaaaggcggtttttaggcgcggcggcaatcaggaaaaaacct

SEQ ID NO: 130 - protein, 436 aa, Neisseria meningitidis
MYAKKGGLGLVKSRRFAPLFATQFLGAFNDNVFKTALFVMIGFYGLGQNGFLPAGQMLNLGALLFILPYFLFSSLSGQLGNKFDKAVLARWAKVLEMIIMAVAAYGFYIRSAPLLLACLFCMGAQSTLFGPLKYAILPDYLDDKELMMGNSLIESGTFVAILFGQILGTAVAGVPPYIVGILVLLVAVGGTVGSLFMPSVPAKAADTQIEWNIVRGTKSLLRETVRHKPVFTAIIGISWFWFVGAVYTTQLPTFTQIHLGGNDNVFNLMLALFSIGIAAGSVLCAKFSRERLRLAWVTVGALGLTVCGLVLVWLTHGHRFEGLNGIFWFLSQGWAYPVMAVMTLIGFFGGFFSVPLYTWLQTASSETFRARAVAANNIVNGIFMVSAAVLSAVLLFLFDSISLLYLIVALGNIPLSVFLIKRERRFLGAAAIRKKP

SEQ ID NO: 131 - DNA, 876 bp, Neisseria meningitidis
  CDS (1)..(876)
atgaattacgcaaaagaaatcaatgcgttaaataacagcctttccgatttgaaaggcgacatcaacgtttcgtttgaattttttccaccgaaaaacgagcaaatggaaacgatgctgtgggattccatccaccgtctgcaaaccctgcatcccaagttcgtatccgtaacctacggcgcaaactccggcgaacgcgaccgcacgcacggcatcgtcaaacgcatcaaacaggaaaccggcttggaagcagcaccgcacctgaccggcatcgacgcatcccccgacgaattgcgccaaatcgccaaagactattgggacagcggcatccgccgcattgtcgccctgcgtggcgacgagccgcccggttatgagaaaaaaccgttttacgccgaagacttggttaagctattacgctccgtcgccgacttcgacatctctgtggcggcatatcccgaagtgcatcccgaagccaaatccgcacaagccgatctgattaatctgaagcgcaaaatcgatgcgggtgcaaaccacgtcatcacccaatttttctttgacgtagaacgctacctgcgcttccgcgaccgctgcgtgatgttgggtatcgatgtggaaatcgtccctggtattttgcctgttaccaacttcaagcagctcggcaaaatggcgcaagtaaccaacgtcaaaatcccaagctggctgtcgcaaatgtatgaaggtttggacgacgaccaaggcacgcgcaacctcgtcgccgccagtatcgccatcgatatggtcaaagtcctgtcccgcgaaggcgtgaaagatttccacttctacacgctcaaccgcagcgagctgacttacgccatctgccatattttaggcgtgcgccct

SEQ ID NO: 132 - protein, 292 aa, Neisseria meningitidis
MNYAKEINALNNSLSDLKGDINVSFEFFPPKNEQMETMLWDSIHRLQTLHPKFVSVTYGANSGERDRTHGIVKRIKQETGLEAAPHLTGIDASPDELRQIAKDYWDSGIRRIVALRGDEPPGYEKKPFYAEDLVKLLRSVADFDISVAAYPEVHPEAKSAQADLINLKRKIDAGANHVITQFFFDVERYLRFRDRCVMLGIDVEIVPGILPVTNFKQLGKMAQVTNVKIPSWLSQMYEGLDDDQGTRNLVAASIAIDMVKVLSREGVKDFHFYTLNRSELTYAICHILGVRP

SEQ ID NO: 133 - DNA, 1371 bp, Neisseria meningitidis
  CDS (1)..(1371)
atgagtaatccattttcctctttaggtttgggtacggaactcgtttccgcactgaccgcgcaaggttacgaaaacccgacacccatccaagccgccgccattcccaaagcactcgccggtcatgatttgctagccgccgcgcaaaccggcacaggcaaaaccgccgcctttatgctgcccagtctggaacgcctcaaacgttacgccaccgccagcacctcgcccgcgatgcaccccgtgcgtatgctcgtcctcacccccacgcgcgaacttgccgaccaaatcgaccaaaacgtgcagggctacatcaaaaacctgccgctgcgccacaccgtcttgttcggcggtatgaatatggacaaacagaccgccgacctgcgtgccggctgcgaaatcgtcgtcgccaccgtcggacggctgctcgaccacgtgaaacagaaaaacatccatttgaacaaagtcgaaatcgtcgttttggacgaagccgaccgtatgctggatatgggttttatcgacgacatccgcaaaatcatgcagatgctgccccgccaacgccaaaccctgctcttttccgccaccttctccgccccgatacgcaaactggcgcaagacttcatgaacgcgcccgaaaccgtcgaagtcgccgcgcaagacaccaccaacgccaacgtcgagcagcacatcatcgccgtcgataccattcagaagcgcaacctgctcgaacggctgattgtcgatttgcatatgaaccaggtcatcgtgttctgcaaaaccaaacaaagcgtcgaccgcgtaacgcgcgaactggtgcgccgcaacctgtccgcacaggcgatacacggcgaccgttcccaacaaagccggctcgaaacactcaacgccttcaaagacggcaacctgcgcgtcctcgtcgccaccgatatcgccgcgcgggggctggatattgccgaactgcccttcgtcatcaattacgaaatgcccgcccagcccgaagactacgtccaccgcatcgggcgcacggggcgcgcgggcgcggacggcgtggcgatttccctgatggacgaatccgaacagaaaatgtttgaatccattaaagagctgaccggcaacaagctgctcatcgagcgcatcgagggcttcgagccgcaatggtgggaacagggcggcgcaaaaccggaaaaacccgaaatgcgcgaaccaagacaacgcaaccgctacgaatccgccaaagcgcaacgcgaaaaaaacacccggccggaaaatgcggcaaacgatgcgggcgcggcttgcggaaaaattgccggacgcagccgccgaagccgccgggaacaccggacgtgcgccctgctccaaccgcgttacggcgtaaaa

SEQ ID NO: 134 - protein, 457 aa, Neisseria meningitidis
MSNPFSSLGLGTELVSALTAQGYENPTPIQAAAIPKALAGHDLLAAAQTGTGKTAAFMLPSLERLKRYATASTSPAMHPVRMLVLTPTRELADQIDQNVQGYIKNLPLRHTVLFGGMNMDKQTADLRAGCEIVVATVGRLLDHVKQKNIHLNKVEIVVLDEADRMLDMGFIDDIRKIMQMLPRQRQTLLFSATFSAPIRKLAQDFMNAPETVEVAAQDTTNANVEQHIIAVDTIQKRNLLERLIVDLHMNQVIVFCKTKQSVDRVTRELVRRNLSAQAIHGDRSQQSRLETLNAFKDGNLRVLVATDIAARGLDIAELPFVINYEMPAQPEDYVHRIGRTGRAGADGVAISLMDESEQKMFESIKELTGNKLLIERIEGFEPQWWEQGGAKPEKPEMREPRQRNRYESAKAQREKNTRPENAANDAGAACGKIAGRSRRSRREHRTCALLQPRYGVK

SEQ ID NO: 135 - DNA, 1374 bp, Neisseria meningitidis
  CDS (1)..(1374)
atgaaacacatccacattatcggtatcggcggcacgtttatgggtgggattgccgccattgccaaagaagcagggtttgaagtcagcggttgcgatgcgaagatgtatccgccgatgagcacccagctcgaagccttgggcataggcgtgtatgaaggcttcgacaccgcgcagttggacgaatttaaagccgacgtttacgttatcggcaatgtcgccaagcgcgggatggatgtggttgaagcgattttgaaccgtgggctgccttatatttccggcccgcaatggctggctgaaaacgtgctgcaccatcattgggtactcggcgtggcggggacgcacggcaaaacgaccaccgcgtctatgctcgcgtgggttttggaatatgccggactcgcaccgggcttccttatcggcggcgtaccggaaaacttcagcgtttccgcccgcctgccgcaaacgccgcgccaagacccgaacagccaatcgccgtttttcgtcattgaagccgacgaatacgacaccgcgtttttcgacaaacgctccaaattcgtgcattaccgtccgcgtaccgccgtgttgaacaatctggaattcgaccacgccgacatcttcgccgatttgggcgcgatacagacccagttccaccacctcgtgcgtaccgtgccgtctgaaggcctcatcgtctgcaacggacggcagcaaagcctgcaagacactttggacaaaggctgctggacgccggtggaaaaattcggcacggaacacggctggcaggccggcgaagccaatgccgatggctcgttcgacgtgttgcttgacggcaaaaaagccggacacgtcgcttggagtttgatgggcggacacaaccgcatgaacgcgctcgccgtcatcgccgccgcgcgtcatgccggagtcgacattcagacggcctgcgaagccttgagcacgtttaaaaacgtcaaacgccgcatggaaatcaaaggcacggcaaacggtatcaccgtttacgacgacttcgcccaccatccgaccgctatcgaaaccacgattcaaggtttgcgccagcgcgtcggcggcgcgcgcatcctcgccgtcctcgaaccgcgttccaatacgatgaagctgggtacgatgaaagccgccctgcccgcaagcctcaaagaagccgaccaagtgttctgctacgccggcggcgcggactgggacgttgccgaagccctcgcgcctttgggcggcaggctgcacgtcggcaaagacttcgatgccttcgttgccgaaatcgtgaaaaacgccgaagcaggcgaccatattttggtgatgagcaacggcggtttcggcggaatacacaccaaactgctggacgctttgaga

SEQ ID NO: 136 - protein, 458 aa, Neisseria meningitidis
MKHIHIIGIGGTFMGGIAAIAKEAGFEVSGCDAKMYPPMSTQLEALGIGVYEGFDTAQLDEFKADVYVIGNVAKRGMDVVEAILNRGLPYISGPQWLAENVLHHHWVLGVAGTHGKTTTASMLAWVLEYAGLAPGFLIGGVPENFSVSARLPQTPRQDPNSQSPFFVIEADEYDTAFFDKRSKFVHYRPRTAVLNNLEFDHADIFADLGAIQTQFHHLVRTVPSEGLIVCNGRQQSLQDTLDKGCWTPVEKFGTEHGWQAGEANADGSFDVLLDGKKAGHVAWSLMGGHNRMNALAVIAAARHAGVDIQTACEALSTFKNVKRRMEIKGTANGITVYDDFAHHPTAIETTIQGLRQRVGGARILAVLEPRSNTMKLGTMKAALPASLKEADQVFCYAGGADWDVAEALAPLGGRLHVGKDFDAFVAEIVKNAEAGDHILVMSNGGFGGIHTKLLDALR

SEQ ID NO: 137 - DNA, 876 bp, Neisseria meningitidis; identical to SEQ ID NO: 83
  CDS (1)..(876)

SEQ ID NO: 138 - protein, 292 aa, Neisseria meningitidis; identical to SEQ ID NO: 84

SEQ ID NO: 139 - DNA, 708 bp, Neisseria meningitidis
  CDS (1)..(708)
ttgcggcagcttggatgtttgattggttttttcagtgttggaatcattatgaatttgaaattagtgtttgaatcgggcgatcccgtcctgatcggtgtgtttgtgttgatgctgttgatgagtatcgtaacgtggtgtttggttgtcttgcgctgcatcaagctgtatcgggcgcgcaaagggaatgccgccgtcaaacggcatatgcgcgatactttgtcgctgaacgacgcggtcgaaaaagtgcgcgccgtcgatgcgcctttgtccaaactggcgcaagaggcattgcagtcttaccgcaactaccgccgaaacgaagcgtccgaactggcgcaggctttgccgttgaacgagtatttggtcattcaaatccgcaacagtatggcgcagattatgcgccggtttgattacgggatgaccgcgcttgcctccatcggcgcgaccgcgccgtttatcgggttgttcggcacggtttgggggatttaccacgccctgatcaatatcgggcaaagcgggcagatgagtattgcggcggttgccggcccgattggcgaggcactggtggcgacggcggcgggtttgttcgtggcgattccggcggtgttggcatacaacttcctcaatcgcggcacaaaaatactgacccaggatttggatgcgatggcgcacgatttgcacgtccgcctgcttaatcaaaaggatagc

SEQ ID NO: 140 - protein, 236 aa, Neisseria meningitidis
LRQLGCLIGFFSVGIIMNLKLVFESGDPVLIGVFVLMLLMSIVTWCLVVLRCIKLYRARKGNAAVKRHMRDTLSLNDAVEKVRAVDAPLSKLAQEALQSYRNYRRNEASELAQALPLNEYLVIQIRNSMAQIMRRFDYGMTALASIGATAPFIGLFGTVWGIYHALINIGQSGQMSIAAVAGPIGEALVATAAGLFVAIPAVLAYNFLNRGTKILTQDLDAMAHDLHVRLLNQKDS

SEQ ID NO: 141 - DNA, 812 bp, Neisseria meningitidis
  CDS (1)..(810)
atgactatgcacgccctcccccgctacgccgtttttggcaaccccgtcgcccacagcaaatcgccgcaaattcatcaacaatttgcccttcaggaaggcgttgacattgaatacgaacgcatttgcgccgacatcggcggtttcgcgcaggcggtttcgacattttttgaaacaggcggttgcggggcaaacgttaccgtaccgttcaagcaggaagcgtttcatctggcggacgagcattctgaacgcgcattggctgccggcgcggtcaacacgctgatttttctgaaaaacggaaaactgcgcggcgacaataccgacggtatcggtttggccaacgacatcacgcaggtcaaaaacattgccatcgaaggcaaaaccatcttgcttttgggcgcgggcggcgcggtgcgcggcgtgattcctgttttgaaagaacaccgtcctgcccgtatcgtcattgccaaccgtacccgcgccaaagccgaggaattggcgcagcttttcggcattgaagccgtcccgatggcggatgtgaacggcggttttgatatcatcatcaacggcacgtcgggcggtctaaacggtcagattcccgatattccgcccgatatttttcaaaactgcgcgcttgcctacgatatggtgtacggctgcgcggcaaaaccgtttttagattttgcacgacaatcgggtgcgaaaaaaactgccgacggactgggtatgctagtcggtcaagcggcggcttcctacgccctctggcgcggatttacgcccgatatccgccccgttatcgaatacatgaaagccct

SEQ ID NO: 142 - protein, 270 aa, Neisseria meningitidis
MTMHALPRYAVFGNPVAHSKSPQIHQQFALQEGVDIEYERICADIGGFAQAVSTFFETGGCGANVTVPFKQEAFHLADEHSERALAAGAVNTLIFLKNGKLRGDNTDGIGLANDITQVKNIAIEGKTILLLGAGGAVRGVIPVLKEHRPARIVIANRTRAKAEELAQLFGIEAVPMADVNGGFDIIINGTSGGLNGQIPDIPPDIFQNCALAYDMVYGCAAKPFLDFARQSGAKKTADGLGMLVGQAAASYALWRGFTPDIRPVIEYMKA

SEQ ID NO: 143 - DNA, 1515 bp, Neisseria meningitidis; identical to SEQ ID NO: 99
  CDS (1)..(1515)

SEQ ID NO: 144 - protein, 505 aa, Neisseria meningitidis; identical to SEQ ID NO: 100

SEQ ID NO: 145 - DNA, 840 bp, Neisseria meningitidis; identical to SEQ ID NO: 87
  CDS (1)..(840)

SEQ ID NO: 146 - protein, 280 aa, Neisseria meningitidis; identical to SEQ ID NO: 88

SEQ ID NO: 147 - DNA, 1572 bp, Neisseria meningitidis
  CDS (1)..(1572)
atgttcagacggtatcttccgaacagacagatgaatatggtttccaaactggacaaatactggcagcaccccgccctctactggcctttgctcatcctttttgccgccgccaccccctttaccttcgcaccctactaccacttttggctgatgcccttgattttcggtgccttcgtccgcctcatcgaactgcgtccgcgttttgctgtctcttccgcctacctgttcggcctgaccgcatacacgacacagttctactggatacacaccgccctgcacgacgtttccggcctgcccgacctctatgccgtaccgctgaccttcctactccccgcctaccttgccctttatccggcactgtgtttctggctgtggaaaaaatttaccctgcctcggggcataaaaatcggtttggtactgcccatcctgtggacactgaccgagtttgcccgcgaacgtttcctgaccggattcggctggggcgcaatcggctactcccaaatcaccccggacagcccgctcgccggctttgccccatttggcggcatccacatggttacactggcaaccgcctttctcggtgtctggctggttttggcgagtgataacaccgcacgttcgggcaaacgcctgcttccaattatcctgattgccgccctgcttgccgcaggctacaccgcccgacaaaccgacttcacccgccccgacggcagccgcagcaccgtcgccctgcttcaaggcaacatcgaccaaaccctcaaatggcgtgaagaccaagtcatcccgaccatacagaaatattacgaacaggtcggcaaaaccactgccgacatcgtcatcctgcccgaaaccgccatccccgtcatgcgccaaaacctgccggaaaacatactggcaaaatttgccgaacaggcgcaaaacaacggcagcgcgctcgccgtcggcatcagccaatacacttcggacggcaacggttacgaaaacgccgtcatcaacctgaccggttatcaggaaaacaatcaggacggcatcccctactacgccaaaaaccacctcgtccccttcggcgaatacaaaccgctgcccttcctgaccacgccgctttacaaaatgatgaatatgcccctttccgacttccgcaaaggcggcggtaagcaatccgccctgctgatgaaaaaccaaaaaatcgccttcaacatctgttacgaagacggattcggcgacgaactgattgccgccgccaaagatgccacactgcttgccaatgccagcaatatggcgtggtacggaaaatccaacgccatgtaccagcacctccaacaatcgcaggcgcgggctatggaactcggacgctatatggtccgtgccaccaacaccggcgcaaccgccatcatctcccccaaaggcaacatcatcgcccaagcccaacccgatacggaaaccgtattggaaggacacatcaaaggctatgtcggcgaaacgccctatatgaaaaccggcagttcatggtggttgatgggcatattgaccctagccgcactgattcttttcatcttccgaaacaaagaacac

SEQ ID NO: 148 - protein, 524 aa, Neisseria meningitidis
MFRRYLPNRQMNMVSKLDKYWQHPALYWPLLILFAAATPFTFAPYYHFWLMPLIFGAFVRLIELRPRFAVSSAYLFGLTAYTTQFYWIHTALHDVSGLPDLYAVPLTFLLPAYLALYPALCFWLWKKFTLPRGIKIGLVLPILWTLTEFARERFLTGFGWGAIGYSQITPDSPLAGFAPFGGIHMVTLATAFLGVWLVLASDNTARSGKRLLPIILIAALLAAGYTARQTDFTRPDGSRSTVALLQGNIDQTLKWREDQVIPTIQKYYEQVGKTTADIVILPETAIPVMRQNLPENILAKFAEQAQNNGSALAVGISQYTSDGNGYENAVINLTGYQENNQDGIPYYAKNHLVPFGEYKPLPFLTTPLYKMMNMPLSDFRKGGGKQSALLMKNQKIAFNICYEDGFGDELIAAAKDATLLANASNMAWYGKSNAMYQHLQQSQARAMELGRYMVRATNTGATAIISPKGNIIAQAQPDTETVLEGHIKGYVGETPYMKTGSSWWLMGILTLAALILFIFRNKEH

SEQ ID NO: 149 - DNA, 558 bp, Neisseria meningitidis
  CDS (1)..(558)
ttggatctctacaaactcggttacaaacaacatacccgtaccgatgcggaaggctatatcgagaaactgcacattacccccgccaatgcccatgagtgcaaacacctgccgccgttgttggaaggactgcccaaaggtacgaccgtctatgccgacaaaggctacgacagtgcggaaaaccggcaacatctggaagaacatcagttgttggacggcattatgcgcaaagcctgccgcaaccgtccgctgtcggaaacgcaaaccaaacgcaaccggtatttgtcgaagacccgttatagtggattaaatttaaatcaggacaaggcgacgaagccgcagacagtacaaatagtacggcaaggcgaggcaacgccgtactggtttaaatttaatccactatatgtggtcgaacagagcttcggtacgctgcaccgtaaattccgctatgcgcgggcagcctatttcggactgattaaagtgagtgcgcaaagccatctgaaggcgatgtgtttgaacctgttgaaagccgccaacaagctaagtgcgcccgctgccgcc

SEQ ID NO: 150 - protein, 186 aa, Neisseria meningitidis
LDLYKLGYKQHTRTDAEGYIEKLHITPANAHECKHLPPLLEGLPKGTTVYADKGYDSAENRQHLEEHQLLDGIMRKACRNRPLSETQTKRNRYLSKTRYSGLNLNQDKATKPQTVQIVRQGEATPYWFKFNPLYVVEQSFGTLHRKFRYARAAYFGLIKVSAQSHLKAMCLNLLKAANKLSAPAAA

SEQ ID NO: 151 - DNA, 1332 bp, Neisseria meningitidis
  CDS (1)..(1332)
atgactgacctgaacaccctgtttgccaacctcaaacaacgcaatcccaatcaggagccgttccatcaggcggttgaagaagtcttcatgagtctcgatccgtttttggcaaaaaatccgaaatacacccagcaaagcctgctggaacgcatcgtcgaacccgaacgcgtcgtgatgttccgcgtaacctggcaggacgataaagggcaagtccaagtcaaccggggctaccgcgtgcaaatgagttccgccatcggtccttacaaaggcggcctgcgcttccatccgaccgtcgatttgggcgtattgaaattcctcgcttttgaacaagtgttcaaaaacgccttgaccaccctgcctatgggcggcggcaaaggcggttccgacttcgaccccaaaggcaaatccgatgccgaagtaatgcgcttctgccaagcctttatgaccgaactctaccgccacatcggcgcggacaccgatgttccggccggcgacatcggcgtaggcgggcgcgaaatcggctacctgttcggacaatacaaaaaaatccgcaacgagttttcttccgtcctgaccggcaaaggtttggaatggggcggcagcctcatccgtcccgaagcgaccggctacggctgcgtctatttcgcccaagcgatgctgcaaacccgcaacgatagttttgaaggcaaacgcgtcctgatttccggttccggcaacgtggcgcaatacgccgccgaaaaagccatccaactgggcgcgaaagtgctgaccgtttccgactccaacggcttcgtcctcttccccgacagcggtatgagcgaagcgcaactcgccgccttgatcgaattgaaagaagtccgccgcgaacgggttgccacctacgccaaagagcaaggtctgcaatactttgaaaaccaaaaaccgtggggcgtcgccgccgaaatcgccctgccctgcgcgacccagaacgaattggacgaagaagccgccaaaaccctgttggcaaacggctgctacgtcgttgccgaaggtgcgaatatgccgtcgactttgggcgcggtcgagcaatttatcaaagccggcatcctctacgccccgggcaaagcctccaacgccggcggcgtagcaacttcaggtttggaaatgagccaaaacgccatccgcctgtcttggactcgtgaagaagtcgaccaacgcctgttcggcatcatgcaaagcatccacgaatcctgtctgaaatacggcaaagtcggcgacacagtaaactacgtcaatggtgcgaacattgccggtttcgtcaaagttgccgatgcgatgctggcgcaaggcttc

SEQ ID NO: 152 - protein, 444 aa, Neisseria meningitidis
MTDLNTLFANLKQRNPNQEPFHQAVEEVFMSLDPFLAKNPKYTQQSLLERIVEPERVVMFRVTWQDDKGQVQVNRGYRVQMSSAIGPYKGGLRFHPTVDLGVLKFLAFEQVFKNALTTLPMGGGKGGSDFDPKGKSDAEVMRFCQAFMTELYRHIGADTDVPAGDIGVGGREIGYLFGQYKKIRNEFSSVLTGKGLEWGGSLIRPEATGYGCVYFAQAMLQTRNDSFEGKRVLISGSGNVAQYAAEKAIQLGAKVLTVSDSNGFVLFPDSGMSEAQLAALIELKEVRRERVATYAKEQGLQYFENQKPWGVAAEIALPCATQNELDEEAAKTLLANGCYVVAEGANMPSTLGAVEQFIKAGILYAPGKASNAGGVATSGLEMSQNAIRLSWTREEVDQRLFGIMQSIHESCLKYGKVGDTVNYVNGANIAGFVKVADAMLAQGF

SEQ ID NO: 153 - DNA, 867 bp, Neisseria meningitidis
  CDS (1)..(867)
atgaaacccatacggaaagccgtcttccccgtcgcagggatgggaacacgcttcctgcccgccaccaaggcaagcccgaaagaaatgctgcccatcgtcgacaagccgctgatccaatacgccgtagaagaagccgtggaagccggctgcacggaaatggtgtttgttaccggacgcaacaaacgcagcatcgaagaccatttcgacaaggcatacgaactcgaaaccgagttggaaatgcgccataaagacaaattgttggaacacgtccgcaacatcctgccgccgaacattacctgcctctacatccgtcaggcggaagcactgggcttgggacacgccgtcttgtgcgcccgcgccgccatcggcgacgaaccctttgccgtgattttggctgacgatttaatcgatgcccaaaaaggcgcgctcaaacaaatggtcgaagtgtacgaacgcagcggcaacagcattttgggcgtagaaactgtcgaaccgtcgcaaaccggctcatacggcatcgtcgaaaccgaacagctcaaacagttccaacgcattaccggcattgtcgaaaaacccaagcccgaagacgcgccctccaaccttgccgtcgtcggacgctacatccttaccccgcgcattttcgacttactgaccggactgccgcgcggcgcgggcaacgaaatccagcttacagacggcatcgccaagctgctcgatcacgaatttgtcctagcgcacccctttgaaggcacgcgctacgactgcggcagcaaactgggctatctggaagccaccgtcgcctacggcctgaaacaccccgaaaccggcgaacccttccgccgccttttggaaaaataccgtaccgaa

SEQ ID NO: 154 - protein, 289 aa, Neisseria meningitidis
MKPIRKAVFPVAGMGTRFLPATKASPKEMLPIVDKPLIQYAVEEAVEAGCTEMVFVTGRNKRSIEDHFDKAYELETELEMRHKDKLLEHVRNILPPNITCLYIRQAEALGLGHAVLCARAAIGDEPFAVILADDLIDAQKGALKQMVEVYERSGNSILGVETVEPSQTGSYGIVETEQLKQFQRITGIVEKPKPEDAPSNLAVVGRYILTPRIFDLLTGLPRGAGNEIQLTDGIAKLLDHEFVLAHPFEGTRYDCGSKLGYLEATVAYGLKHPETGEPFRRLLEKYRTE

SEQ ID NO: 155 - DNA, 876 bp, Neisseria meningitidis; identical to SEQ ID NO: 83
  CDS (1)..(876)

SEQ ID NO: 156 - protein, 292 aa, Neisseria meningitidis; identical to SEQ ID NO: 84

SEQ ID NO: 157 - DNA, 1008 bp, Neisseria meningitidis
  CDS (1)..(1008)
atgtccatcaaaatcctgattatttcccccagttggataggcgactgcgtgatgacccagcccttgttccgccgtttgaaggaacttcaccccggttgcacgattgatgtgttcgcaccgaagtggtcgatggcggtgtttgagcgtatgccggaagtgaatgagattcttgaaaatccgttcggacacggtgcgttggagttgaaacgccgttggcgggtcggtagggatttggggcggcgcggatacgatcaggttatcgtgttgcccggttctttgaaatcggcaatcatcgcgctggcgacaggtatcggtaaaaggacgggttatgtcggtgaaagccgttattttctgttgaacgatatacgcaggctggataaggaacgtctgcctttgatggtggacagatatacggctctcgcgcatccgagccaggaggattttgacgggcattcgggattccccgagttttccattgatgaacggcggcgggaaatttctgtcgaaacctttggcttggatattggaaagcctgttctggctttttgtccgggtgcggaattcgggccggcaaagcgttggccgacaaggtattttgccgagttgggcaaacattattcggcggcgggttggcaggtttggctgttcggttcgcaaaaagatgatgaaattgccgaggaaatcaactgcctttcagacggtatgtgtgtcaatttgtgcggcaaaaccgatttgtcgcaggcaatggatttgctgtcgttggcggacacggtcgtgtgcaacgacagcgggctgatgcacttggcggcggcattgggcaggaaggtggtggcggtttacggttcttccagcccgacgcatacgccgcctttgagcgacagggcgaaaatcgtcagcctgcacttggaatgttcgccctgttttaagcgggaatgtccgctggggcataccgactgcctcaacaggctgtatcccgagaagattgtgcaggcggttgaagaggcggta

SEQ ID NO: 158 - protein, 336 aa, Neisseria meningitidis
MSIKILIISPSWIGDCVMTQPLFRRLKELHPGCTIDVFAPKWSMAVFERMPEVNEILENPFGHGALELKRRWRVGRDLGRRGYDQVIVLPGSLKSAIIALATGIGKRTGYVGESRYFLLNDIRRLDKERLPLMVDRYTALAHPSQEDFDGHSGFPEFSIDERRREISVETFGLDIGKPVLAFCPGAEFGPAKRWPTRYFAELGKHYSAAGWQVWLFGSQKDDEIAEEINCLSDGMCVNLCGKTDLSQAMDLLSLADTVVCNDSGLMHLAAALGRKVVAVYGSSSPTHTPPLSDRAKIVSLHLECSPCFKRECPLGHTDCLNRLYPEKIVQAVEEAV

SEQ ID NO: 159 - DNA, 381 bp, Neisseria meningitidis
  CDS (1)..(381)
atggaaccttcctcctacgcggcagaaaaaaaaggaaaaggcggcatcaggcgcgtcatcaacgcattcggctattcgatagacggcatcgccgccgcctaccgttacgaagcggcattccgtcaggttttgtggctgaacgcgctgctggtgtgcgcggcatttttttgggtttccgaaaagtccctccgcctgccgttgattatcgcgtcttttgtgtcggtcattgtcgaactgttcaacactgccgtcgaagccgccgtcgatcatacttcgactgaaaaacacgagctggctaaacgcgccaaagacgcaggttctgctgcacaattgttcgcgatgctgatgttagcggcggtttggctgtccgccctgttcggg

SEQ ID NO: 160 - protein, 127 aa, Neisseria meningitidis
MEPSSYAAEKKGKGGIRRVINAFGYSIDGIAAAYRYEAAFRQVLWLNALLVCAAFFWVSEKSLRLPLIIASFVSVIVELFNTAVEAAVDHTSTEKHELAKRAKDAGSAAQLFAMLMLAAVWLSALFG

SEQ ID NO: 161 - DNA, 990 bp, Neisseria meningitidis
  CDS (1)..(990)
atgaaaaaagaaagccgccccgcgtttgacgcggcagccgtatttgacgcggcagccgtaccggtatccgacagcgggtttgccgccaatgcaaatgtccgccgttttgtggacgatgaagtcgggaaaggggatttttcccgggcggaatggcaggatttttttgacaaagcggcttacaaggcggacatcgtcaagattatgcaccgcccctccacatcgcgtccgtggtatgtgttccgcacgggaaattcgggcaaggcgaaatttcgcggcgcgcgccggttttatgcggaaaaccgcgcgcttatcgatgatgtggcgcaaaaatacggcgtgcctgccgaacttatcgtggcggttatcgggattgaaacgaattacggcaaaaatacgggcagtttccgtgtggcggacgcattggcgaccttaggctttgattacccccgccgcgccgggtttttccaaaaagaattggtcgagcttttaaagctggcaaaagaagaaggcggcgatgttttcgcctttaaaggcagctatgcgggcgcaatggggatgccgcaatttatgccttcgagctaccggaaatgggcggtggattatgacggggacggacatcgggacatatggggcaatgttggcgatgtcgcggcatcgattgccaattatatgaagcagcacggttggcgcacgggcgggaaaatactggtgtctgcaacattggcgccgggtgcggatgttcaggcaatcattggcgaaaaaaccgccctgacgcggacggtggcggatttgaaggcgtacggcatcatccccggcgaagagcttgccgatgatgaaaaggcggttttgttcaaactggaaaccgcacccggcgtgtttgaatattatttgggcttgaacaatttttatacggtatggcagtacaatcacagtcggatgtatgtaacggcggtcagggacattgccaattcgcttggcggcccgggattg

SEQ ID NO: 162 - protein, 330 aa, Neisseria meningitidis
MKKESRPAFDAAAVFDAAAVPVSDSGFAANANVRRFVDDEVGKGDFSRAEWQDFFDKAAYKADIVKIMHRPSTSRPWYVFRTGNSGKAKFRGARRFYAENRALIDDVAQKYGVPAELIVAVIGIETNYGKNTGSFRVADALATLGFDYPRRAGFFQKELVELLKLAKEEGGDVFAFKGSYAGAMGMPQFMPSSYRKWAVDYDGDGHRDIWGNVGDVAASIANYMKQHGWRTGGKILVSATLAPGADVQAIIGEKTALTRTVADLKAYGIIPGEELADDEKAVLFKLETAPGVFEYYLGLNNFYTVWQYNHSRMYVTAVRDIANSLGGPGL

SEQ ID NO: 163 - DNA, 1773 bp, Neisseria meningitidis; identical to SEQ ID NO: 77
  CDS (1)..(1773)

SEQ ID NO: 164 - protein, 591 aa, Neisseria meningitidis; identical to SEQ ID NO: 78

SEQ ID NO: 165 - DNA, 381 bp, Neisseria meningitidis; identical to SEQ ID NO: 159
  CDS (1)..(381)

SEQ ID NO: 166 - protein, 127 aa, Neisseria meningitidis; identical to SEQ ID NO: 160

SEQ ID NO: 167 - DNA, 1257 bp, Neisseria meningitidis
  CDS (1)..(1257)
atgagtatggcacttgcccaaaaacttgccgccgacagcattgcggcggttgccgaaggacgcaaccttcaggacgtgttggcgcaaatccgcaccgcgcatcccgaccttacggcgcaggaaaacggcgcgttgcaggacatcgcctacggctgccagcgttatttgggcagtttgaaacatatgctcgcgcagatgctgaaaaagccgattggcaatccgcagctcgaaagtctgcttttggcggcgttgtaccaactgcattacacgcgcaacgcgccgcatgctgtggtcaacgaagctgttgaaagcatcgccaaaatcggacgcgggcagtaccgttcgtttgccaacgcgattttgcgccgctttttgcgcgaacgcgacaagcttgcggcttcctgcaaaaaagacgatgtggcgaaacacaacctgccgctgtggtgggtggcttacttgaaaaaccattatccgaaacactggcacaacatcgccgccgcgctgcaatcccatccgccgatgacgttgcgcgtcaaccgccgacacggcaacgccgaaagctatttggaaaaactggctgcggaaggcattgcggcaaaggcgttggacgaatatgcggttacgttggaagaagccgtgccggtgaaccgcctgcccggtttttcagacggcattgtttcggtacaggacttcggcgcgcagcaggcggcgtatctccttaacccgaaagacggcgaacggattttggacgcgtgcgccgcgccgggcggcaagacggggcatatcttggaactggcggattgccgcgttaccgccttggacattgatgcaggccgtctgaagcgtgtggaggacaatatcgcccgtttgggctttcagacggcatcggcggcgtgtgccgatgcgcgggatttggcggcgtggtatgatggaaagcctttcgacacaatccttgccgacgtgccatgcaccgcttccggcgtggcgcggcgcaatcccgacgtgaaatggctgcgccgtccgaccgacgcgctcaaaaccgcccgccagcaggaagccctgctggacgcactttggcagacgctgaaacagggcggcagaatgctgcttgccacctgttccgtgttcgtcgaagaaaacgacgggcaattgcaaaaattcctcaaccgccatgccgatgccgaaccgatcgaatcgcgggtgcttttaccgaacaaacaccaagatggcttttattacgcgcttattcaaaagcat

SEQ ID NO: 168 - protein, 419 aa, Neisseria meningitidis
MSMALAQKLAADSIAAVAEGRNLQDVLAQIRTAHPDLTAQENGALQDIAYGCQRYLGSLKHMLAQMLKKPIGNPQLESLLLAALYQLHYTRNAPHAVVNEAVESIAKIGRGQYRSFANAILRRFLRERDKLAASCKKDDVAKHNLPLWWVAYLKNHYPKHWHNIAAALQSHPPMTLRVNRRHGNAESYLEKLAAEGIAAKALDEYAVTLEEAVPVNRLPGFSDGIVSVQDFGAQQAAYLLNPKDGERILDACAAPGGKTGHILELADCRVTALDIDAGRLKRVEDNIARLGFQTASAACADARDLAAWYDGKPFDTILADVPCTASGVARRNPDVKWLRRPTDALKTARQQEALLDALWQTLKQGGRMLLATCSVFVEENDGQLQKFLNRHADAEPIESRVLLPNKHQDGFYYALIQKH

SEQ ID NO: 169 - DNA, 804 bp, Neisseria meningitidis
  CDS (1)..(804)
atgaatatgaaaaaatggattgccgccgcccttgcctgttccgcgctcgcgctgtctgcctgcggcggtcagggtaaagatgccgccgcgcccgccgcaaatcccgacaaagtgtaccgcgtggcttccaacgccgagtttgccccctttgaatctttagactcgaaaggcaatgtcgaaggtttcgatgtggatttgatgaacgcgatggcgaaggcgggcaattttaaaatcgaattcaaacaccagccgtgggacagccttttccccgccttgaacaacggcgatgcggacgttgtgatgtcgggcgtaaccattaccgacgaccgcaaacagtctatggacttcagcgacccgtattttgaaatcacccaagtcgtcctcgttccgaaaggcaaaaaaatatcttcttccgaagatttgaaaaacatgaacaaagtcggcgtggtaaccggctacacgggcgatttctccgtatccaaactcttgggcaacgacaacccgaaaatcgcgcgctttgaaaacgttcccctgattatcaaagaactggaaaacggcggcttggattccgtggtcagcgacagcgcagtcatcgccaattatgtgaaaaacaatccgaccaaagggatggacttcgttaccctgcccgacttcaccaccgaacactacggcatcgcggtacgcaaaggcgacgaagcaaccgtcaaaatgctgaacgatgcgttgaaaaaagtacgcgaaagcggcgaatacgacaaaatctacgccaaatattttgcaaaagaagacggacaggccgcaaaa

SEQ ID NO: 170 - protein, 268 aa, Neisseria meningitidis
MNMKKWIAAALACSALALSACGGQGKDAAAPAANPDKVYRVASNAEFAPFESLDSKGNVEGFDVDLMNAMAKAGNFKIEFKHQPWDSLFPALNNGDADVVMSGVTITDDRKQSMDFSDPYFEITQVVLVPKGKKISSSEDLKNMNKVGVVTGYTGDFSVSKLLGNDNPKIARFENVPLIIKELENGGLDSVVSDSAVIANYVKNNPTKGMDFVTLPDFTTEHYGIAVRKGDEATVKMLNDALKKVRESGEYDKIYAKYFAKEDGQAAK

SEQ ID NO: 171 - DNA, 864 bp, Neisseria meningitidis; identical to SEQ ID NO: 53
  CDS (1)..(864)

SEQ ID NO: 172 - protein, 288 aa, Neisseria meningitidis; identical to SEQ ID NO: 54

SEQ ID NO: 173 - DNA, 1794 bp, Neisseria meningitidis
  CDS (1)..(1794)
ttgccccgaattgccatgccctatttcgccctgtttgacgatgccgtaagcggtcgcgcaaaacgctatcaaaatcatgtggaaagccgttttttccgtcccgaagaactcgatgctttggacggcgcgctgcaatcgggctggcaaaaagggctgcatgccgtgttgtttgcagactacggattcggtttgccgctgacgggggtcgagtccgaacgcggcggcaaccttgccctgcactggtttgccgactgcgccgacaccgatgccgcaagctggcttgcccgacactcagacggcctccccgccggcatttccacgccgcaatcctccgtatccgaagccgattacctcgaccatatccgccaaatccacgaagccatccgacgcggcgacacctatcaaatcaactacactacccgcctgcacctgcaagcctacggcaatcccgtcaaactttaccaacgcctgcgccagcccgtcccctatgccgttttgtcccacctgcccgatgcacaagggcaatccgcgtggacgctgtgtttctcgcccgaactcttcctcaaaatcggttcggacggcaccatcagcaccgaaccgatgaaaggcaccgcgccgattttgggcgacggacaagacgaacgccgcgccgccgagttgcaagcagacccgaaaaaccgcgccgaaaacgtgatgattgtcgatttgctgcgtaacgacctcggcaaaatcgcccaaaccggcacagtatgcgtacccgaaccgtttaaagtatcgcgtttcggcagcgtttggcagatgaccagcaccatccaagcccaagccttgccgcacacctcgttcgccgacatcctccgcgccgccttcccctgcggcagcatcaccggcgcgcccaaaaaaatgagtatgcagattatcgaatcgctcgaagccgaagcgcgcggactttatacgggcagcatcggctatttgaacccgtgttccggcggcttggggtttgaaggcacgttcaacgtcgttatccgcaccttgtcgctcacgccgctttcagacggcatttatcaaggcgtgtacggtgtcggttccggcatcgtcatcgacagcgaccctgccgccgaatatcgggaatgcggctggaaagcccgtttcctcaacgaattgcgccccgacttcggcatttttgaaaccctgcgcgtggaaaacggacgctgcgccctgctcgaccgccacctatgccgtctgaaaacctccgcccaagccctcaacctgcccctgcccgacggttgcgaaaatcaaatcaaacaatacatcgcacgcttgcccgacggcgcgttccgcatcaaagccctgctcgcttcagacggcatcagcctgtcccgcgccgttttaaaccgtctgaccgacaaacaacgcgtcatcatttcgccgaccatcctgcccgcacaaaactacctgcgccgcttcaaaaccacctgccgcaccgtcttcgaccaagcgtggcaaaccgccgaaacacaaggcgcgttcgacagcctgtttttcaattcagacggcatcctgctcgaaggcggcagaagcaacgtgttcgtcaaacatcgcggacaatggctcacgccctctttagatttagacattttaaacggcataatgcgccaagccgtgttggacgaaccgcaaaaatatttgcaaacaaatcaagtaatcgaaacacacatcacacaaaaaacactgcaagaagccgaagaaatccgcctctccaacgccttgcgcggcgtatttgccgccgcccttgcc

SEQ ID NO: 174 - protein, 598 aa, Neisseria meningitidis
LPRIAMPYFALFDDAVSGRAKRYQNHVESRFFRPEELDALDGALQSGWQKGLHAVLFADYGFGLPLTGVESERGGNLALHWFADCADTDAASWLARHSDGLPAGISTPQSSVSEADYLDHIRQIHEAIRRGDTYQINYTTRLHLQAYGNPVKLYQRLRQPVPYAVLSHLPDAQGQSAWTLCFSPELFLKIGSDGTISTEPMKGTAPILGDGQDERRAAELQADPKNRAENVMIVDLLRNDLGKIAQTGTVCVPEPFKVSRFGSVWQMTSTIQAQALPHTSFADILRAAFPCGSITGAPKKMSMQIIESLEAEARGLYTGSIGYLNPCSGGLGFEGTFNVVIRTLSLTPLSDGIYQGVYGVGSGIVIDSDPAAEYRECGWKARFLNELRPDFGIFETLRVENGRCALLDRHLCRLKTSAQALNLPLPDGCENQIKQYIARLPDGAFRIKALLASDGISLSRAVLNRLTDKQRVIISPTILPAQNYLRRFKTTCRTVFDQAWQTAETQGAFDSLFFNSDGILLEGGRSNVFVKHRGQWLTPSLDLDILNGIMRQAVLDEPQKYLQTNQVIETHITQKTLQEAEEIRLSNALRGVFAAALA

SEQ ID NO: 175 - DNA, 279 bp, Neisseria meningitidis
  CDS (1)..(279)
ttgcaaaactttcggaaacccaatatgcagaccgttaccatgtacacaggtccgttttgcccctactgcacgatggcgaaaaggctgctgcacgcggcaggtgtcggacatatcgacgaaatccgtgtcgatgcaagtcccgaagcctttgccgaaatgcagcagctttccggacagcgcagcgtgccgcagattttcatcggcgaaacgcacgtcggcggatttaccgacctctaccgcctccagcaggaaggcgggctggacggactgctgaaccct

SEQ ID NO: 176 - protein, 93 aa, Neisseria meningitidis
LQNFRKPNMQTVTMYTGPFCPYCTMAKRLLHAAGVGHIDEIRVDASPEAFAEMQQLSGQRSVPQIFIGETHVGGFTDLYRLQQEGGLDGLLNP

SEQ ID NO: 177 - DNA, 2274 bp, Neisseria meningitidis; identical to SEQ ID NO: 71
  CDS (1)..(2274)

SEQ ID NO: 178 - protein, 758 aa, Neisseria meningitidis; identical to SEQ ID NO: 72

SEQ ID NO: 179 - DNA, 867 bp, Neisseria meningitidis; identical to SEQ ID NO: 153
  CDS (1)..(867)

SEQ ID NO: 180 - protein, 289 aa, Neisseria meningitidis; identical to SEQ ID NO: 154

SEQ ID NO: 181 - DNA, 603 bp, Neisseria meningitidis
  CDS (1)..(603)
atgacaataatgaatatcaatacttccgaaaataaagatgctgttgccgaacacaccggacaatggttggaaaaagccgtcatcggtctgaacctgtgtccctttgccaaagccccccacgttaaaaaccttgtccgcatcgcaatcagcgaagccaaacaccttgacagttttttggaagacttggacgaagaactgcagcgactgggcaatacacccgccaccgaactggaaactaccctgctggttcacccgaccctattccccgatttcgacgtattcaacgatatgctcgacattgccgatgccgccgttgtcgaaaacggcttggaaggcatcatccaaatcgccccgtttcatcccgatttccaatttgaaggcacggattcagacgacatcggcaactacaccaaccgttctccctatccgacgctgcacctcatccgcgaagacagcattgccaaagccgcacaagcctttcccgacgcttcggcaatattcgaacgcaatatcgccctgctggaaaaaatgggacatgagggctgggcaaaactcggtatcacatcctgcccttatccgcacaataagaaaaatatttcaaaa

SEQ ID NO: 182 - protein, 201 aa, Neisseria meningitidis
MTIMNINTSENKDAVAEHTGQWLEKAVIGLNLCPFAKAPHVKNLVRIAISEAKHLDSFLEDLDEELQRLGNTPATELETTLLVHPTLFPDFDVFNDMLDIADAAVVENGLEGIIQIAPFHPDFQFEGTDSDDIGNYTNRSPYPTLHLIREDSIAKAAQAFPDASAIFERNIALLEKMGHEGWAKLGITSCPYPHNKKNISK

SEQ ID NO: 183 - DNA, 1338 bp, Neisseria meningitidis
  CDS (1)..(1338)
ttgcacacccttctagcttttatcttcgccatcctgattttggtcagcctgcacgaattcggacactacatcgtcgccagattgtgcggcgtcaaggttgtgcgtttttccgtcggcttcggcaaaccgtttttcacccgaaagcgcggcgacaccgaatggtgcctcgccccgattccgttgggcggttacgtcaaaatggtcgacacgcgcgaaggcgaagtatcagaagccgatttaccctacgcttttgacaaacaacaccccgccaagcgcatcgccatcgtcgccgccggcccgctgaccaacctcgcactggcggttttgctgtacggactgagcttttccttcggcgttaccgaactgcgcccctatgtcggcacagtcgaacccgacaccattgccgcccgcgccggcttccaaagcggcgacaaaatacaatccgtcaacggcacacccgttgcagattggggcagcgcgcaaaccgaaatcgtcctcaacctcgaagccggcaaagtcgccgtcggcgttcagacggcatcgggcgcgcaaaccgtccgcaccatcgatgccgcaggcacgccggaagccggtaaaatcgcaaaaaaccaaggctacatcggactgatgccctttaaaatcacaaccgttgccggcggcgtggaaaaaggcagccccgccgaaaaagcaggcctgaaaccgggcgacaggctgactgccgccgacggcaaacccatcgcctcatggcaagaatgggcaaacctgacccgccaaagccccggcaaaaaaatcaccctgacctacgaacgcgccggacaaacccataccgccgacatccgccccgatactgtcgaacagcccgaccacaccctgatcgggcgcgtcggcctccgtccgcagccggacagggcgtgggacgcgcaaatccgccgcagctaccgtccgtctgttgtccgcgcattcggcatgggctgggaaaaaaccgtttcccactcgtggacaaccctcaaatttttcggcaaactaatcagcggcaacgcctccgtcagccatatttccggtccgctgaccattgccgatattgccggacagtccgccgaactcggcttgcaaagttatttggaatttttggcactggtcagcatcagcctcggcgtgctgaacctgctgcccgtccccgttttggacggcggccacctcgtgttttatactgccgaatggatacgcggcaaacctttgggcgaacgcgtccaaaacatcggtttgcgcttcgggcttgccctcatgatgctgatgatggcggtcgccttcttcaacgacgttacccggctgctcggt

SEQ ID NO: 184 - protein, 446 aa, Neisseria meningitidis
LHTLLAFIFAILILVSLHEFGHYIVARLCGVKVVRFSVGFGKPFFTRKRGDTEWCLAPIPLGGYVKMVDTREGEVSEADLPYAFDKQHPAKRIAIVAAGPLTNLALAVLLYGLSFSFGVTELRPYVGTVEPDTIAARAGFQSGDKIQSVNGTPVADWGSAQTEIVLNLEAGKVAVGVQTASGAQTVRTIDAAGTPEAGKIAKNQGYIGLMPFKITTVAGGVEKGSPAEKAGLKPGDRLTAADGKPIASWQEWANLTRQSPGKKITLTYERAGQTHTADIRPDTVEQPDHTLIGRVGLRPQPDRAWDAQIRRSYRPSVVRAFGMGWEKTVSHSWTTLKFFGKLISGNASVSHISGPLTIADIAGQSAELGLQSYLEFLALVSISLGVLNLLPVPVLDGGHLVFYTAEWIRGKPLGERVQNIGLRFGLALMMLMMAVAFFNDVTRLLG

SEQ ID NO: 185 - DNA, 1476 bp, Neisseria meningitidis; identical to SEQ ID NO: 101
  CDS (1)..(1476)

SEQ ID NO: 186 - protein, 492 aa, Neisseria meningitidis; identical to SEQ ID NO: 102

SEQ ID NO: 187 - DNA, 1191 bp, Neisseria meningitidis
  CDS (1)..(1191)
atgttcttcaagcacatcgaagccgcccccgccgatccgattctcggtttgggcgaagcattcaaagccgaaacccgccccgaaaaagtcaacctcggcatcggcgtgtacaaagacgcatccggcgcgacacctattgtcaaagccgtcaaagaagccgaaaaacgcctgttggaaagcgaaacaactaaaaactacctcaccatcgacggcgttgccgactacaacgagcaaacccaaattctgctgttcggcaaagaccacgaaatcatcgccagccgtcgcgccaaaacagcgcaaagccttggcggtacaggcgcattgcgtattgcggccgagtttgccaaacgtcagttgaacgcgcaaaccatctggatttccaatccgacttggcccaaccacaacgccatcgccaaagcggtcggtatccaagaccaaccttatcgctactatgatgccgccaaacacggtttggattgggacggtatgattgaagacttgagccaagcgcaaaaaggcgacatcgtcctgctgcacggctgctgccacaaccctaccggtatcgaccctacgcccgaacaatgggaaactctggcaaaactttctgccgaaaaaggctggttaccgctgtttgactttgcctaccaaggcttcggcaatggtttggaagaagatgcctacggcctgcgcgtgttcttgaaacacaatacagaattgctgattgccagctcttattccaaaaacttcggtatgtacaacgagcgcgtcggcgcgttcactttggtggccgaagatgaagcaaccgccgcccgcgcccacagccaagtcaaaaccattatccgtaccttgtattccaaccctgcttcacacggcgcgaacactattgcgctggtgttgaaaaatgatgatttgaaagcacaatggattgccgaactcgatgaaatgcgcggccgtatcaaagccatgcgccaaaaatttgtcgagttgctcaaagccaaaggtgcaactcaagactttgatttcattatcgaacaaaacggcatgttctccttcagcggcttgactcccgaacaagtcgaccgtttaaaaaacgagtttgccatttatgccgtccgctccggccgcatcaacgtcgccggcattaccgacgacaacatcgattatctgtgcgaaagtatcgtaaaagtactg

SEQ ID NO: 188 - protein, 397 aa, Neisseria meningitidis
MFFKHIEAAPADPILGLGEAFKAETRPEKVNLGIGVYKDASGATPIVKAVKEAEKRLLESETTKNYLTIDGVADYNEQTQILLFGKDHEIIASRRAKTAQSLGGTGALRIAAEFAKRQLNAQTIWISNPTWPNHNAIAKAVGIQDQPYRYYDAAKHGLDWDGMIEDLSQAQKGDIVLLHGCCHNPTGIDPTPEQWETLAKLSAEKGWLPLFDFAYQGFGNGLEEDAYGLRVFLKHNTELLIASSYSKNFGMYNERVGAFTLVAEDEATAARAHSQVKTIIRTLYSNPASHGANTIALVLKNDDLKAQWIAELDEMRGRIKAMRQKFVELLKAKGATQDFDFIIEQNGMFSFSGLTPEQVDRLKNEFAIYAVRSGRINVAGITDDNIDYLCESIVKVL

SEQ ID NO: 189 - DNA, 222 bp, Neisseria meningitidis
  CDS (1)..(222)
gcttcgcagcaggagctggaggcgctgccgggcataggccctgcgaaggcgaaggccattgcggaataccgtgcgcaaaacggtgcgttcaagtctgtagacgatttgaccaaggtaaagggcatcggccctgcggtgctggcgaagctgaaggatcaggcttctgtcggtgcgcccgcaccaaaaggcccggcaaaaccggctctgcccgcagctaaaaaa

SEQ ID NO: 190 - protein, 74 aa, Neisseria meningitidis
ASQQELEALPGIGPAKAKAIAEYRAQNGAFKSVDDLTKVKGIGPAVLAKLKDQASVGAPAPKGPAKPALPAAKK

SEQ ID NO: 191 - DNA, 684 bp, Neisseria meningitidis
  CDS (1)..(684)
atgtttgcttttttagaagccttttttgtcgaatacggttatgcggctgttttttttgtattggtcatctgcggtttcggcgtgccgattcccgaggatttgaccttggtaacaggcggcgtgatttcgggtatgggttataccaatccgcatattatgtttgcagtcggtatgctcggcgtattggtcggggacggcatcatgttcgccgccggacgaatttgggggcagaaaatcctaaggttcaaacctattgcgcgcatcatgacgccgaaacgttatgagcaggttcaggaaaaattcgacaaatacggtaactgggtcttatttgtcgcccgtttcctgcccggtttgagaacggccgtatttgttacagccggtatcagccgcaaggtttcatacttgcgttttatcattatggatggactggccgcactgatttccgtccctatttggatttatctgggcgaatacggtgcgcacaacatcgattggctgatggcgaaaatgcacagcctgcaatcgggtatttttgttatcttgggtataggtgcgaccgttgtcgcttggatttggtggaaaaaacgccaacgtatccagttttaccgcagcaaattgaaagaaaagcgggcgcaacgcaaagccgccaaggcagccaaaaaagccgcgcaaagcaaacaataa

SEQ ID NO: 192 - protein, 227 aa, Neisseria meningitidis
MFAFLEAFFVEYGYAAVFFVLVICGFGVPIPEDLTLVTGGVISGMGYTNPHIMFAVGMLGVLVGDGIMFAAGRIWGQKILRFKPIARIMTPKRYEQVQEKFDKYGNWVLFVARFLPGLRTAVFVTAGISRKVSYLRFIIMDGLAALISVPIWIYLGEYGAHNIDWLMAKMHSLQSGIFVILGIGATVVAWIWWKKRQRIQFYRSKLKEKRAQRKAAKAAKKAAQSKQ

SEQ ID NO: 193 - DNA, 1089 bp, Neisseria meningitidis
  CDS (1)..(1089)
atgaatgactacacgcagcagcttcaaggtaaaaaagactaccttaaaaccctttttgcaggtttggatgttcctgagtgggaagtgtacgaatctccggacaaacattaccgtatgcgtgccgagttccgtatttggcacgaaggcggggaaatgttttatgccatgtttgaaaaagggcagaaagccagcggcgcaagcatgatacgctgcgaccgttttgaagcagcttccgaggctgtcaaccgcctcatgcccgagctgatcgccgccgccgcgcaatcccccgaactcaaaaaacgctggtatgccgtcgaatttctgtccacgctcagcggggaaatgctggttaccatgatttaccacaaaaggcttgatgctgagtggatgcaggcggcgcaagcgttacagcaacagttggatatttccgttattgggcggagcaggggacagaaaatagtcttaaaacaggactatgtaacggaaactttgaaggtcggcaaccgggatttccgttatcggcaaattgaaggcagttttacccaaccgaatgccgccgtgtgtcagaaaatgcttgaatgggcgtgccgcacggcggaaggcttgggcagcgacctgctcgaactgtattgcggaaacggcaatttcaccctgccgctgtcccgatatttccgacaggttttggcaaccgaaatctccaaaacctccgtcagcgcggcgcaatggaatatcgaagccaaccgcatcggcaacatcaaaatcgcccgtctgtctgctgaagaatttaccgaagcctataccggaaaacgtgagtttaaacgccttaaggatggcggtattgctttgacggattacgcattttccactattttcgtcgatccgccgcgtgccggtatcgatgaggaaactttgaagctggtgtcgcagtttgacaacatcatctacatttcctgcaatcccgaaacgttgcgcgccaatttggacaccttggcggaaacccatgcggtcgaacgtgccgccctgttcgaccaattcccgtttacgcaccatatcgaaagtggtgtattgttgaaaaagaaaatcctttga

SEQ ID NO: 194 - protein, 362 aa, Neisseria meningitidis
MNDYTQQLQGKKDYLKTLFAGLDVPEWEVYESPDKHYRMRAEFRIWHEGGEMFYAMFEKGQKASGASMIRCDRFEAASEAVNRLMPELIAAAAQSPELKKRWYAVEFLSTLSGEMLVTMIYHKRLDAEWMQAAQALQQQLDISVIGRSRGQKIVLKQDYVTETLKVGNRDFRYRQIEGSFTQPNAAVCQKMLEWACRTAEGLGSDLLELYCGNGNFTLPLSRYFRQVLATEISKTSVSAAQWNIEANRIGNIKIARLSAEEFTEAYTGKREFKRLKDGGIALTDYAFSTIFVDPPRAGIDEETLKLVSQFDNIIYISCNPETLRANLDTLAETHAVERAALFDQFPFTHHIESGVLLKKKIL

SEQ ID NO: 195 - DNA, 2145 bp, Neisseria meningitidis
  CDS (1)..(2145)
atgaataccccattgttccgtctcagcctgctctcgcttaccctggcggcaggttttgcccatgcggcagaaaataatgccaaggtcgtactggataccgttaccgtaaaaggcgaccgccaaggcagcaaaatccgtaccaacatcgttacgctgcaacaaaaagacgaaagcaccgcaaccgatatgcgcgaactcttaaaagaagagccctccatcgatttcggcggcggcaacggcacgtcccaattcctgacgctgcgcggcatgggtcaaaactctgtcgacatcaaggtggacaacgcctattccgacagccaaatcctttaccaccaaggcagatttattgtcgatcccgctttggttaaagtcgtttccgtacaaaaaggcgcgggttccgcctctgccggtatcggcgcgaccaacggcgcgatcatcaccaaaaccgtcgatgcccaagacctgctcaaaggcttggataaaaactggggcgtgcgcctcaacagcggctttgccagcaacgaaggcgtaagctacggcgcaagcgtattcgggaaagagggcaacttcgacggcttgttctcttacaaccgcaacaatgaaaaagattacgaagcaggtaaaggcttccgtaataatttcaacggcggcaaaaccgtaccgtacagcgcgctggacaaacgcagctacctcgccaaaatcggaacaagcttcggcgacggcgaccaccgcatcgtattgagccatatgaaagaccagcaccggggcatccgtaccgtccgtgaagaatttaccgtcggcggcgataaagagcgaataagtatggaacgccaagcccctgcttaccgcgaaaccacacaatccaacaccaatttggcgtacacgggtaaaaacctgggctttgtcgaaaaactggatgccaacgcctatgtgttggaaaaagaacgctattccgccgatgacagcggcaccggttacgcaggcaatgtaaaaggccccaaccatacccaaatcaccactcggggtatgaacttcaacttcgacagccgccttgccgaacaaaccctgctgaaatacggtatcaactaccgccatcaggaaatcaaaccgcaagcgtttttgaattcacaatttaaaattgaagataaagaaaaagcaactgatgaagagaaaaataagaaccgtgaaaatgaaaaaattgccaaagcctaccgtctgaccaacccgaccaaaaccgataccggcgcgtatatcgaagccattcacgagattgacggctttaccctgaccggcgggctgcgttacgaccgcttcaaggtgaaaacccacgacggcaaaaccgtttcaagcaacaaccttaacccgagtttcggcgtgatttggcagccgcacgaacactggagcttcagcgcgagccacaactacgccagccgcagcccgcgcctgtatgacgcgctgcaaacccacggcaaacgcggcatcatctcgattgccgacggcacgaaagccgaacgcgcgcgcaataccgaaatcggcttcaactacaacgacggcacgtttgccgcaaacggcagctacttctggcagaccatcaaagacgcgcttgccaatccgcaaaaccgccacgactctgtcgccgtccgtgaagccgtcaatgccggttacatcaaaaaccacggttacgaattgggcgcgtcctaccgcaccggcggcctgactgccaaagtcggcgtaagccacagcaaaccgcgcttttacgatacgcacaaagacaagctgttgagcgcgaatcctgaatttggcgcacaagtcggccgcacttggacggcttcccttgcctaccgcttccaaaacccgaatctggaaatcggctggcgcggccgttatgttcaaaaagccgtgggttcgatattggtggcaggtcaaaaagaccgcaacggcaaattggaaaacgttgtacgcaaaggtttcggtgtgaacgatgtcttcgccaactggaaaccgctgggcaaagacacgctcaatgttaatctttcggttaacaacgtgttcaacacgttctactatccgcacagccaacgatggaccaataccctgccgggcgtgggacgtgatgtacgcttgggcgtgaactacaagttctaa

SEQ ID NO: 196 - protein, 714 aa, Neisseria meningitidis
MNTPLFRLSLLSLTLAAGFAHAAENNAKVVLDTVTVKGDRQGSKIRTNIVTLQQKDESTATDMRELLKEEPSIDFGGGNGTSQFLTLRGMGQNSVDIKVDNAYSDSQILYHQGRFIVDPALVKVVSVQKGAGSASAGIGATNGAIITKTVDAQDLLKGLDKNWGVRLNSGFASNEGVSYGASVFGKEGNFDGLFSYNRNNEKDYEAGKGFRNNFNGGKTVPYSALDKRSYLAKIGTSFGDGDHRIVLSHMKDQHRGIRTVREEFTVGGDKERISMERQAPAYRETTQSNTNLAYTGKNLGFVEKLDANAYVLEKERYSADDSGTGYAGNVKGPNHTQITTRGMNFNFDSRLAEQTLLKYGINYRHQEIKPQAFLNSQFKIEDKEKATDEEKNKNRENEKIAKAYRLTNPTKTDTGAYIEAIHEIDGFTLTGGLRYDRFKVKTHDGKTVSSNNLNPSFGVIWQPHEHWSFSASHNYASRSPRLYDALQTHGKRGIISIADGTKAERARNTEIGFNYNDGTFAANGSYFWQTIKDALANPQNRHDSVAVREAVNAGYIKNHGYELGASYRTGGLTAKVGVSHSKPRFYDTHKDKLLSANPEFGAQVGRTWTASLAYRFQNPNLEIGWRGRYVQKAVGSILVAGQKDRNGKLENVVRKGFGVNDVFANWKPLGKDTLNVNLSVNNVFNTFYYPHSQRWTNTLPGVGRDVRLGVNYKF

SEQ ID NO: 197 - DNA, 2625 bp, Neisseria meningitidis
  CDS (1)..(2625)
atgaaaacctccgaactgcgccaaaaattcctaaaattttttgaaaccaaaggccacaccgtcgtccgctcttccagcctcgtgccgcacgacgacccgaccctgctgtttaccaacgcgggcatgaaccagtttaaagacgtattcttaggtttcgacaaacgcccgtacagccgcgccaccaccgcgcaaaaatgcgtacgcgcaggcggcaaacacaacgacttggaaaacgtcggctacaccgcccgccaccacaccttctttgaaatgatgggcaacttctccttcggcgactacttcaaacgcgacgccatccacttcgcttgggaatttctgacttcccccgaatggctcaacatccctaaagacaaactgttggcgaccgtttacgcggaagacgacgaagcctacaacatctggttgaacgaaatcggtatgccgtccgagcgcatcgtccgcatcggcgacaacaaaggcgcgaaatacgcatccgacaacttctggcaaatgggcgacaccggcccttgcggcccctgctccgaaattttctacgaccacggcgaagaaatctggggcggcattcccggcagtcccgaagaagacggcgaccgctggatcgaaatttggaactgcgtatttatgcagttcaaccgcgacgaacaaggcaatatgaacccgcttcccaaaccttccgtcgataccggtatgggcttggaacgcatagccgccgtcatgcagcatgttcacagcaactacgaaatcgacttgttccaagacctgctcaaagccgttgcccgcgaaaccggcgcgccgttcagaatggaagaacccagcctgaaagtcatcgccgaccacatccgctcctgctcgttcctgattgcagacggcgtcttgccttccaacgaaggccgcggctacgtattgcgccgcattatccgccgcgccgtgcgccacggttacaaactgggtcaaagcaaaccgttcttccacaaactcgttgccgatttggtcaaagagatgggcggtgcctaccctgaattgaaagaaaaacaagcccaaatcgaagaagcattgaaaaacgaagaaagccgttttgcccaaacgctggaaaccggtatggctttgttggaaaacgcgctggtcaaaggcggcaaaacactcggcggcgaaatcatcttcaaactctacgatacctacggtttcccatacgacttgactgccgacatctgccgcgaacgcaatatcgaaccggacgaagcaggcttcgagcgcgaaatggaagcccaacgcgcacgcgcacgcgccgcccaaagcttcaaagccaacgcccaactgccttatgacggtcaagacaccgagtttaaaggttatagcgaacgccaaaccgaatccaaagtcctcgccctctacaaagacggcgagcaagtcaacgaattgaacgaaggcgacagcggcgcagtcgtcatcgactttaccccgttctatgcagaatccggcggccaagtcggcgatgtcggctatatcttctcaggcgaaaaccgctttgaagtacgcgatacccaaaaaatcaaagcggccgtattcggtcaattcggcgtacaaacttcaggccgtctgaaagtcggcgacagcgttaccgccaaagtggacgacgaaatccgcaatgccaatatgcgcaaccacagcgcaacccacttgatgcacaaagccctgcgcgatgtattgggcagacacgtcgaacaaaaaggctctttggttaccgccgaatccacccgtttcgacatttcccatccccaagcggtaactgccgaagaaattgccgaagtagaacgccgcgtcaacgaagccattttggcgaacgttgccgtcaatgcagccattatgagcatggaagacgcgcaaaaaaccggcgcgatgatgctcttcggcgaaaaatacggcgaagaagtgcgcgtactgcaaatgggcggtttctctaccgaattgtgcggcggcacacacgtttcacgcaccggcgacatcggcctcttcaaaatcatcagcgaaggcggtattgccgcaggcgtgcgccgtatcgaagccatcaccggcctgaacgcactcaaatgggcgcaagagcaagagcgtttggtgaaagacattattgccgaaaccaaagcccaaaccgaaaaagacgtactggcaaaaatccaagcaggcgcggcacacgccaaagcattggaaaaagaattggcacgcgccaaagccgaactcgccgtccacgcaggcgccaaactcttggacgatgcaaaagacttgggcgcagccaaactcgttgccgcccaaatcgaagccgacgcagccgccctgcgcgaaatcgttaccgatttaaccggtaaatccgacaacgccgtgattcttttagcggcagtaaacgacggcaaagtctccctgtgcgccggcgtatccaaaccgttgaccggcaaagtgaaagcaggcgatctggttaaatttgcagccgaacaagtcggcggcaaaggcggcggcagaccagatttggcgcaagccggcggcacggatgccgacaaattgcccgccgtgttggatagcgtgaaagactgggtcggcgcgaagctggtttga

SEQ ID NO: 198 - protein, 874 aa, Neisseria meningitidis
MKTSELRQKFLKFFETKGHTVVRSSSLVPHDDPTLLFTNAGMNQFKDVFLGFDKRPYSRATTAQKCVRAGGKHNDLENVGYTARHHTFFEMMGNFSFGDYFKRDAIHFAWEFLTSPEWLNIPKDKLLATVYAEDDEAYNIWLNEIGMPSERIVRIGDNKGAKYASDNFWQMGDTGPCGPCSEIFYDHGEEIWGGIPGSPEEDGDRWIEIWNCVFMQFNRDEQGNMNPLPKPSVDTGMGLERIAAVMQHVHSNYEIDLFQDLLKAVARETGAPFRMEEPSLKVIADHIRSCSFLIADGVLPSNEGRGYVLRRIIRRAVRHGYKLGQSKPFFHKLVADLVKEMGGAYPELKEKQAQIEEALKNEESRFAQTLETGMALLENALVKGGKTLGGEIIFKLYDTYGFPYDLTADICRERNIEPDEAGFEREMEAQRARARAAQSFKANAQLPYDGQDTEFKGYSERQTESKVLALYKDGEQVNELNEGDSGAVVIDFTPFYAESGGQVGDVGYIFSGENRFEVRDTQKIKAAVFGQFGVQTSGRLKVGDSVTAKVDDEIRNANMRNHSATHLMHKALRDVLGRHVEQKGSLVTAESTRFDISHPQAVTAEEIAEVERRVNEAILANVAVNAAIMSMEDAQKTGAMMLFGEKYGEEVRVLQMGGFSTELCGGTHVSRTGDIGLFKIISEGGIAAGVRRIEAITGLNALKWAQEQERLVKDIIAETKAQTEKDVLAKIQAGAAHAKALEKELARAKAELAVHAGAKLLDDAKDLGAAKLVAAQIEADAAALREIVTDLTGKSDNAVILLAAVNDGKVSLCAGVSKPLTGKVKAGDLVKFAAEQVGGKGGGRPDLAQAGGTDADKLPAVLDSVKDWVGAKLV

SEQ ID NO: 199 - DNA, 207 bp, Neisseria meningitidis
  CDS (1)..(207)
gtgcaaagaggccgtctgaaaggtctcgtttgccgtaggttgggtcgcgacccaacaaattttgtgaagtataaaaatgttggtcatgacccaacctacctgcctttttgtacaaagaggctatctgaaaggccttgtttgccgtatggtgggtcgcgacccagcagatttttattagggtatgacccaagctacttgctacgataa

SEQ ID NO: 200 - protein, 68 aa, Neisseria meningitidis
VQRGRLKGLVCRRLGRDPTNFVKYKNVGHDPTYLPFCTKRLSERPCLPYGGSRPSRFLLGYDPSYLLR

SEQ ID NO: 201 - DNA, 2277 bp, Neisseria meningitidis
  CDS (1)..(2277)
atggcacaaactacactcaaacccattgttttatcaattcttttaatcaacacacccctcctcgcccaagcgcatgaaactgagcaatcggtggatttggaaacggtcagcgtcgtcggcaaaagccgtccgcgcgccacgtcggggctgttgcacacttcgaccgcctccgacaaaatcatctccggcgataccttgcgccaaaaagccgtcaacttgggcgacgctttagacggcgtaccgggcatccacgcttcgcaatacggcggcggcgcgtctgctcccgtcattcgcggtcaaacaggcaggcggattaaagtgttgaaccatcacggcgaaacaggcgatatggcggatttttcgcccgatcacgccattatggtagataccgccttgtcgcaacaggtcgaaatcctgcgcgggccggttacgctcttgtacagctcgggcaatgtggcggggctggtcgatgttgccgatggcaaaatccccgaaaaaatgcctgaaaacggcgtatcgggcgaactcggattgcgtttgagcagcggcaatctggaaaaactcacgtccggcggcatcaatatcggtttgggcaaaaactttgtattgcacacggaagggctgtaccgcaaatcgggggattacgccgtaccgcgttaccgcaatctgaaacgcctgcccgacagccacgccgattcgcaaacgggcagcatcgggctgtcttgggttggcgaaaaaggttttatcggcgtagcgtacagcgaccgtcgcgaccaatatggtctgcctgcccacagccacgaatacgatgattgccacgccgacatcatctggcaaaagagcttgattaacaaacgctatttacagctttatccgcacctgttgaccgaagaagacatcgattacgacaatccgggcttgagctgcggcttccacgacgacgataatgcacacgcacacacccacagcggcagaccgtggatagacctgcgcaacaaacgctacgaactccgtgccgaatggaagcaaccgttccccggttttgaagccctgcgcgtacacctgaaccgcaacgactaccgccacgacgaaaaagcaggcgatgcagtcgaaaacttttttaacaaccaaacgcaaaacgcccgcatcgagttgcgccaccaacccataggtcgtctgaaaggcagctggggcgtgcaatatttacaacaaaaatccagtgctttatctgccatatccgaagcggttaaacaaccgatgctgcttgacaacaaagtgcaacattacagctttttcggtgtagaacaggcaaactgggacaacttcacgcttgaaggaggcgtacgcgtggaaaaacaaaaagcctccattcagtacgacaaagcattgattgatcgggaaaactactacaaccaccccctgcccgacctcggcgcgcaccgccaaaccgcccgctcattcgcactttcgggcaactggtatttcacgccacaacacaaactcagcctgaccgcctcccatcaggaacgcctgccgtcaacgcaagagctgtacgcacacggcaaacacgtcgccaccaacacctttgaagtcggcaacaaacacctcaacaaagagcgttccaacaatatcgaactcgcgctgggctacgaaggcgaccgctggcaatacaatctggcactctaccgcaaccgcttcggtaactacatttacgcccaaaccttaaacgacggacgcggccccaaatccatcgaagacgacagcgaaatgaagctcgtgcgctacaaccaatccggcgccgacttctacggcgcggaaggcgaaatctacttcaaaccgacaccgcgctaccgcatcggcgtttccggcgactatgtacgaggccgtctgaaaaacctgccttccctacccggcagagaagatgcctacggcaaccgtcctttcatcgcacaggacgaccaaaatgccccccgtgttccggctgcgcgcctcggcttccacctgaaagcctcgctgaccgaccgtatcgatgccaatttggactactaccgcgtgttcgcccaaaacaaactcgcccgctacgaaacgcgcacgcccggacaccatatgctcaacctcggcgcaaactaccgccgcaatacgcgctatggcgagtggaattggtacgtcaaagccgacaacctgctcaaccaatccgtttacgcccacagcagctttctctctgatacgccgcaaatgggccgcagctttaccggcggcgtgaacgtgaagttttaa

SEQ ID NO: 202 - protein, 758 aa, Neisseria meningitidis
MAQTTLKPIVLSILLINTPLLAQAHETEQSVDLETVSVVGKSRPRATSGLLHTSTASDKIISGDTLRQKAVNLGDALDGVPGIHASQYGGGASAPVIRGQTGRRIKVLNHHGETGDMADFSPDHAIMVDTALSQQVEILRGPVTLLYSSGNVAGLVDVADGKIPEKMPENGVSGELGLRLSSGNLEKLTSGGINIGLGKNFVLHTEGLYRKSGDYAVPRYRNLKRLPDSHADSQTGSIGLSWVGEKGFIGVAYSDRRDQYGLPAHSHEYDDCHADIIWQKSLINKRYLQLYPHLLTEEDIDYDNPGLSCGFHDDDNAHAHTHSGRPWIDLRNKRYELRAEWKQPFPGFEALRVHLNRNDYRHDEKAGDAVENFFNNQTQNARIELRHQPIGRLKGSWGVQYLQQKSSALSAISEAVKQPMLLDNKVQHYSFFGVEQANWDNFTLEGGVRVEKQKASIQYDKALIDRENYYNHPLPDLGAHRQTARSFALSGNWYFTPQHKLSLTASHQERLPSTQELYAHGKHVATNTFEVGNKHLNKERSNNIELALGYEGDRWQYNLALYRNRFGNYIYAQTLNDGRGPKSIEDDSEMKLVRYNQSGADFYGAEGEIYFKPTPRYRIGVSGDYVRGRLKNLPSLPGREDAYGNRPFIAQDDQNAPRVPAARLGFHLKASLTDRIDANLDYYRVFAQNKLARYETRTPGHHMLNLGANYRRNTRYGEWNWYVKADNLLNQSVYAHSSFLSDTPQMGRSFTGGVNVKF

SEQ ID NO: 203 - DNA, 225 bp, Neisseria meningitidis
  CDS (1)..(225)
atgaggctggcaaccaaggatttggcggaagccattaggaaaggacaggttcgcaaatcaagctttaacacagaacaattaagggcaattgaaaaaggagaatctaaaataccggattacacttggcatcatcatcaagatacaggaaggatgcaattgattcgtgaaggcttgcatcatgataccggccatattggttgggaagcaatgaacaaaggaaggtaa

SEQ ID NO: 204 - protein, 74 aa, Neisseria meningitidis
MRLATKDLAEAIRKGQVRKSSFNTEQLRAIEKGESKIPDYTWHHHQDTGRMQLIREGLHHDTGHIGWEAMNKGR

SEQ ID NO: 205 - DNA, 1176 bp, Neisseria meningitidis
  CDS (1)..(1176)
atggcaaaaatgatgaaatgggcggctgttgcggcggtcgcggcggcagcggtttggggcggatggtcttatctgaagcccgagccgcaggctgcttatattacggaaacggtcaggcgcggcgacatcagccggacggtttctgcaacaggggagatttcgccgtccaacctggtatcggtcggcgcgcaggcatcggggcagattaagaaactttatgtcaaactcgggcaacaggttaaaaagggcgatttgattgcggaaatcaattcgacctcgcagaccaatacgctcaatacggaaaaatccaaattggaaacgtatcaggcgaagctggtgtcggcacagattgcattgggcagcgcggagaagaaatataagcgtcaggcggcgttgtggaaggatgatgcgaccgctaaagaagatttggaaagcgcacaggatgcgcttgccgccgccaaagccaatgttgccgagctgaaggctctaatcagacagagcaaaatttccatcaataccgccgagtcggaattgggctacacgcgcattaccgcaacgatggacggcacggtggtggcgattctcgtggaagaggggcagactgtgaacgcggcgcagtctacgccgacgattgtccaattggcgaatctggatatgatgttgaacaaaatgcagattgccgagggcgatattaccaaggtgaaggcggggcaggatatttcgtttacgattttgtccgaaccggatacgccgattaaggcgaagctcgacagcgtcgaccccgggctgaccacgatgtcgtcgggcggctacaacagcagtacggatacggcttccaatgcggtctactattatgcccgttcgtttgtgccgaatccggacggcaaactcgccacggggatgacgacgcagaatacggttgaaatcgacggtgtgaaaaatgtgctgattattccgtcgctgaccgtgaaaaatcgcggcggcagggcgtttgtgcgcgtgttgggtgcagacggcaaggcggcggaacgcgaaatccggaccggtatgagagacagtatgaataccgaagtaaaaagcgggttgaaagagggggacaaagtggtcatctccgaaataaccgccgccgagcagcaggaaagcggcgaacgcgccctaggcggcccgccgcgccga

SEQ ID NO: 206 - protein, 392 aa, Neisseria meningitidis; identical to SEQ ID NO: 106

SEQ ID NO: 207 - DNA, 342 bp, Neisseria meningitidis
  CDS (1)..(342)
ttgtttgtatgctttgaaaaatgtttgtttccggattttgccattcccatccggttttgcgctgtacgatgtgttttagcgcggacttgctcaaaatcggatgtggttccggtatttggggctttgattagggatgcggactttcaatatatttttctcagctacaacaacgaaggcttgatgtctgtcgggcaggtaagggagatttttgagcgtttcggcaaatataatttggttcaaacggaatatcggcgttttaaggcagataagacagaaaaccgtaatcataaggcaaattcgatattcgaatatctgcatgagacctttgcaaaaatagtctgt

SEQ ID NO: 208 - protein, 114 aa, Neisseria meningitidis
LFVCFEKCLFPDFAIPIRFCAVRCVLARTCSKSDVVPVFGALIRDADFQYIFLSYNNEGLMSVGQVREIFERFGKYNLVQTEYRRFKADKTENRNHKANSIFEYLHETFAKIVC

SEQ ID NO: 209 - DNA, 24 bp, Artificial Sequence
  Primer sequence
ttggttaattggttgtaacactgg

SEQ ID NO: 210 - DNA, 19 bp, Artificial Sequence
  Primer sequence
attctcatgtttgacagcg

SEQ ID NO: 211 - DNA, 18 bp, Artificial Sequence
  Primer sequence
atcctacaacctcaagct

SEQ ID NO: 212 - DNA, 18 bp, Artificial Sequence
  Primer sequence
atcccattctaaccaagc

SEQ ID NO: 213 - DNA, 19 bp, Artificial Sequence
  Primer sequence
aagagattacgcgcagacc

SEQ ID NO: 214 - DNA, 18 bp, Artificial Sequence
  Primer sequence
aatacgcaaccgcctctc

1. A peptide encoded by an operon including any of the nucleotide sequences identified herein as SEQ ID NOS. 1, 3, 5, 7, 9, 11, 13, 15, 17, 19, 21, 23, 25, 27, 29, 31, 33, 35, 37, 39, 41, 43, 45, 47, 49, 51, 53, 55, 57, 59, 61, 63, 65, 67, 69, 71, 73, 75, 77, 79, 81, 83, 85, 87, 89, 91, 93, 95, 97, 99, 101, 103, 105, 107, 109, 111, 113, 115, 117, 119, 121, 123, 125, 127, 129, 131, 133, 135, 137, 139, 141, 143, 145, 147, 149, 151, 153, 155, 157, 159, 161, 163, 165, 167, 169, 171, 173, 175, 177, 179, 181, 183, 185, 187, 189, 191, 193, 195, 197, 199, 201, 203, 205, 207, of N. meningitidis, or a related molecule having at least 40% sequence similarity or identity at the peptide or nucleotide level in a Gram-negative bacterium, or a functional fragment thereof, for therapeutic or diagnostic use.

2. A peptide according to claim 1, wherein the sequence similarity or identity is at least 60%.

3. A peptide according to claim 1 or claim 2, wherein the sequence similarity or identity is at least 90%.

4. A peptide according to claim 1, comprising the amino acid sequence identified herein as SEQ ID NOS. 2, 4, 6, 8, 10, 12, 14, 16, 18, 20, 22, 24, 26, 28, 30, 32, 34, 36, 38, 40, 42, 44, 46, 48, 50, 52, 54, 56, 58, 60, 62, 64, 66, 68, 70, 72, 74, 76, 78, 80, 82, 84, 86, 88, 90, 92, 94, 96, 98, 100, 102, 104, 106, 108, 110, 112, 114, 116, 118, 120, 122, 124, 126, 128, 130, 132, 134, 136, 138, 140, 142, 144, 146, 148, 150, 152, 154, 156, 158, 160, 162, 164, 166, 168, 170, 172, 174, 176, 178, 180, 182, 184, 186, 188, 190, 192, 194, 196, 198, 200, 202, 204, 206 and 208.

5. A polynucleotide encoding a peptide according to any preceding claim, for therapeutic or diagnostic use.

6. A host transformed to express a peptide according to any of claims 1 to 4.

7. An attenuated microorganism comprising a mutation that disrupts the expression of any of the nucleotide sequences defined in claim 1.

8. A microorganism according to claim 7, wherein the mutation is insertional inactivation or a gene deletion.

9. A microorganism according to claim 7 or claim 8, wherein the microorganism is Neisseria meningitidis.

10. A microorganism according to any of claims 7 to 9, comprising a second mutation in a second nucleotide sequence.

11. A microorganism according to any of claims 7 to 10, for therapeutic or diagnostic use.

12. A microorganism according to any of claims 7 to 11, comprising a heterologous antigen, therapeutic peptide or nucleic acid.

13. A vaccine comprising a peptide according to any of claims 1 to 4, or the means for its expression.

14. A vaccine comprising a microorganism according to any of claims 7 to 12.

15. An antibody raised against a peptide according to any of claims 1 to 4.

16. Use of a product according to any of claims 1 to 12, for the manufacture of a medicament for use in the treatment or prevention of a condition associated with infection by Neisseria or Gram-negative bacteria.

17. Use according to claim 16, wherein the condition is meningitis.

18. Use according to claim 16 or claim 17, for veterinary treatment.

19. Use of a product according to any of claims 1 to 12, in a screening assay for the identification of an antimicrobial drug.
